(19) United States
(12) Patent Application Publication
(10) Pub. No.: US 2023/0108894 A1
(43) Pub. Date: Apr. 6, 2023

(54) CORONAVIRUS RNA VACCINES

(71) Applicant: ModernaTX, Inc, Cambridge, MA (US)

(72) Inventors: Guillaume Stewart-Jones, Cambridge, MA (US); Elisabeth Narayanan, Cambridge, MA (US); Hamilton Bennett, Cambridge, MA (US); Andrea Carfi, Cambridge, MA (US); Mihir Metkar, Cambridge, MA (US); Vladimir Presnyak, Manchester, NH (US)

(73) Assignee: Moderna TX, Inc, Cambridge, MA (US)

(21) Appl. No.: 17/796,208

(22) PCT Filed: Jan. 26, 2021
(86) PCT No.: PCT/US2021/015145

§ 371 Date: Jul. 28, 2022

Related U.S. Application Data
(60) Provisional application No. 63/016,175, filed on Apr. 27, 2020.
(60) Provisional application No. 63/009,005, filed on Apr. 13, 2020.
(60) Provisional application No. 63/002,094, filed on Mar. 30, 2020.
(60) Provisional application No. 62/971,825, filed on Feb. 7, 2020.
(60) Provisional application No. 62/967,006, filed on Jan. 28, 2020.

(51) Int. Cl. A61K 39/215; C07K 14/005; A61P 31/14

(52) U.S. Cl. CPC A61K 39/215; C07K 14/005; A61P 31/14; C12N 2770/20022; C12N 2770/20034; A61K 2039/53

(57) ABSTRACT

The disclosure relates to coronavirus ribonucleic acid (RNA) vaccines as well as methods of using the vaccines and compositions comprising the vaccines.

### RELATED APPLICATION

[0001] This application claims the benefit under 35 U.S.C. § 119(e) of U.S. provisional application No. 62/967,006, filed Jan. 28, 2020, U.S. provisional application No. 62/971,825, filed Feb. 7, 2020, U.S. provisional application No. 63/002,094, filed Mar. 30, 2020, U.S. provisional application No. 63/009,005, filed Apr. 13, 2020, and U.S. provisional application No. 63/016,175, filed Apr. 27, 2020, each of which are incorporated by reference herein in their entirety.

### BACKGROUND

[0002] Human coronaviruses are highly contagious enveloped, positive single-stranded RNA viruses of the Coronaviridae family. Two sub-families of Coronaviridae are known to cause human disease. The most important being the β-coronaviruses (beta-coronaviruses). The β-coronaviruses are common etiological agents of mild to moderate upper respiratory tract infections. Outbreaks of novel coronavirus infections such as the infections caused by a Wuhan coronavirus, however, have been associated with a high mortality rate death toll. A Severe Acute Respiratory Syndrome Coronavirus 2 (SARSCoV-2) (formerly referred to as a “Wuhan coronavirus,” a “2019 novel coronavirus,” or a “2019-nCoV”) was initially identified from the Chinese city of Wuhan in December 2019 and has rapidly infected hundreds of thousands of people. The pandemic disease that the SARSCoV-2 virus causes has been named by World Health Organization (WHO) as COVID-19 (Coronavirus Disease 2019). The first genome sequence of a SARS-CoV-2 isolate (also referred to as 2019 nCoV or Wuhan-Hu-1) was deposited in GenBank on Jan. 12, 2020 by investigators from the Chinese CDC in Beijing.

[0003] Currently, there is no specific treatment for COVID-19 or vaccine for SARS-CoV-2 infection. The continuing health problems and mortality associated with coronavirus infections, particularly the SARS-CoV-2 pandemic, are of tremendous concern internationally. The public health crisis caused by SARS-CoV-2 reinforces the importance of rapidly developing effective and safe vaccine candidates against these viruses.

### SUMMARY

[0004] Provided herein, in some embodiments, are immunizing compositions (e.g., RNA vaccines) that comprise an RNA that encodes highly immunogenic antigens capable of eliciting potent neutralizing antibodies responses against coronavirus antigens, such as SARS-CoV-2 antigens. Surprisingly, the protein antigen sequences of this novel coronavirus share less than 80% identity with the protein antigen sequences of Severe Acute Respiratory Syndrome (SARS) coronavirus, and less than 35% identity with the protein antigen sequences of the Middle East Respiratory Syndrome (MERS) coronavirus.

[0005] The constructs provided herein, in some embodiments, include: a reversion of the polybasic cleavage site in the native SARS-CoV-2 Spike (S) protein to a single basic cleavage site (e.g., FIG. 1, Variant 7, SEQ ID NO: 23); a deletion of the polybasic ER/Golgi signal sequence (KXHXX-COOH) at the carboxy tail (e.g., FIG. 1, Variant 8, SEQ ID NO: 26); a double proline stabilizing mutation (e.g., FIG. 1, Variants 1-6 and 9, SEQ ID NOs: 5, 8, 11, 14, 17, 20, and 29); a modified protease cleavage site to stabilize the protein (e.g., FIG. 1, Variants 3 and 5, SEQ ID NOs: 11 and 17); a deletion of the cytoplasmic tail (e.g., FIG. 1, Variants 3, 4, and 6, SEQ ID NOs: 11, 14, and 20); and/or a foldon scaffold (e.g., FIG. 1, Variants 3 and 4, SEQ ID NOs: 11 and 14). The structural features disclosed herein include, for instance, abolishment of furin cleavage site by optionally replacing it with a transmembrane region, a foldon grafted to the C-terminal portion of the spike ectodomain, deleted C-terminal intracellular tail (carboxy tail), Thus, the mRNA provided herein, in some embodiments, comprises an open reading frame encoding a variant trimeric spike protein comprising any one or more of a deleted furin cleavage site, additional foldon sequence as C-terminus, deleted carboxy tail or sequence therein and/or 2 proline mutation.

[0006] Some aspects of the present disclosure provide a ribonucleic acid (RNA) comprising an open reading frame (ORF) that encodes a coronavirus antigen (e.g., an S protein, a membrane (M) protein, an envelope (E) protein, a nucleocapsid (NC) protein, or a protein of Table 1) capable of inducing an immune response (e.g., a neutralizing antibody response) to SARS-CoV-2, optionally wherein the RNA is formulated in a lipid nanoparticle.

[0007] Other aspects of the present disclosure provide a codon-optimized RNA comprising an ORF that comprises a sequence having at least 80% identity to a wild-type RNA encoding a SARS-CoV-2 antigen, optionally wherein the RNA is formulated in a lipid nanoparticle.

[0008] Yet other aspects of the present disclosure provide a chemically-modified RNA comprising an ORF that comprises a sequence having at least 80% identity to a wild-type RNA encoding a SARS-CoV-2 antigen, optionally wherein the RNA is formulated in a lipid nanoparticle.

[0009] Still other aspects of the present disclosure provide an RNA comprising an ORF that comprises a sequence having at least 80% identity to the sequence of any one of the sequences of Table 1, e.g., SEQ ID NOs: 3, 7, 10, 13, 16, 19, 22, 25, 28, 31, 48, 50, 52, 54, 56, 61, 62, 64, 66, 68, 70, 72, 74, 76, 78, 80, 82, or 84. In some embodiments, the RNA comprises an ORF that comprises a sequence having at least 80% identity to the sequence of SEQ ID NO: 28. In some embodiments, the RNA comprises an ORF that comprises a sequence having at least 80% identity to the sequence of SEQ ID NO: 16. In some embodiments, the RNA comprises an ORF that comprises a sequence having at least 80% identity to the sequence of SEQ ID NO: 19. In some embodiments, the RNA comprises an ORF that comprises a sequence having at least 80% identity to the sequence of SEQ ID NO: 22. In some embodiments, the RNA comprises an ORF that comprises a sequence having at least 80% identity to the sequence of SEQ ID NO: 25.

[0010] In some embodiments, the ORF comprises a sequence having at least 85%, at least 90%, at least 95%, or at least 98% identity to the sequence of any one of the sequences of Table 1, e.g., SEQ ID NOs: 3, 7, 10, 13, 16, 19, 22, 25, 28, 31, 48, 50, 52, 54, 56, 61, 62, 64, 66, 68, 70, 72, 74, 76, 78, 80, 82, or 84. In some embodiments, the RNA comprises an ORF that comprises a sequence having at least 85%, at least 90%, at least 95%, or at least 98% identity to the sequence of SEQ ID NO: 28. In some embodiments, the RNA comprises an ORF that comprises the sequence of SEQ ID NO: 28. In some embodiments, the RNA comprises an ORF that comprises a sequence having at least 85%, at least 90%, at least 95%, or at least 98% identity to the sequence of SEQ ID NO: 16. In some embodiments, the RNA comprises an ORF that comprises the sequence of SEQ ID NO: 16. In some embodiments, the RNA comprises an ORF that comprises a sequence having at least 85%, at least 90%, at least 95%, or at least 98% identity to the sequence of SEQ ID NO: 19. In some embodiments, the RNA comprises an ORF that comprises the sequence of SEQ ID NO: 19. In some embodiments, the RNA comprises an ORF that comprises a sequence having at least 85%, at least 90%, at least 95%, or at least 98% identity to the sequence of SEQ ID NO: 22. In some embodiments, the RNA comprises an ORF that comprises the sequence of SEQ ID NO: 22. In some embodiments, the RNA comprises an ORF that comprises a sequence having at least 85%, at least 90%, at least 95%, or at least 98% identity to the sequence of SEQ ID NO: 25. In some embodiments, the RNA comprises an ORF that comprises the sequence of SEQ ID NO: 25. In some embodiments, the RNA comprises an ORF that comprises a sequence having at least 85%, at least 90%, at least 95%, or at least 98% identity to the sequence of SEQ ID NO: 106. In some embodiments, the RNA comprises an ORF that comprises the sequence of SEQ ID NO: 106. In some embodiments, mRNAs comprising the ORF are uniformly modified (e.g., fully modified, modified throughout the entire sequence) for a particular modification. For example, an RNA can be uniformly modified with 1-methyl-pseudouridine, such that each U in the sequence is a 1-methyl-pseudouridine.

[0011] In some embodiments, the RNA further comprises a 5′ UTR, optionally wherein the 5′ UTR comprises the sequence of SEQ ID NO: 2 or SEQ ID NO: 36.

[0012] In some embodiments, the RNA further comprises a 3′ UTR, optionally wherein the 3′ UTR comprises the sequence of SEQ ID NO: 4 or SEQ ID NO: 37.

[0013] In some embodiments, the RNA further comprises a 5′ cap analog, optionally a 7mG(5′)ppp(5′)NlmpNp cap. Other cap analogs may be used.

[0014] In some embodiments, the RNA further comprises a poly(A) tail, optionally having a length of 50 to 150 nucleotides.

[0015] In some embodiments, the ORF encodes a coronavirus antigen. In some embodiments, the coronavirus antigen is a structural protein. In some embodiments, the structural protein is a spike (S) protein. In some embodiments, the S protein is a stabilized prefusion form of an S protein. In some embodiments, the coronavirus antigen comprises a sequence having at least 80% identity to the sequence of any one of the sequences of Table 1, e.g., SEQ ID NOs: 5, 8, 11, 14, 17, 20, 23, 26, 29, 32, 33, 34, 35, 47, 49, 59, 63, 65, 67, 69, 71, 73, 75, 77, 79, 81, 83, or 85. In some embodiments, the coronavirus antigen comprises a sequence having at least 80% identity to the sequence of SEQ ID NO: 29. In some embodiments, the coronavirus antigen comprises a sequence having at least 80% identity to the sequence of SEQ ID NO: 17. In some embodiments, the coronavirus antigen comprises a sequence having at least 80% identity to the sequence of SEQ ID NO: 20. In some embodiments, the coronavirus antigen comprises a sequence having at least 80% identity to the sequence of SEQ ID NO: 23. In some embodiments, the coronavirus antigen comprises a sequence having at least 80% identity to the sequence of SEQ ID NO: 26. In some embodiments, the coronavirus antigen comprises a sequence having at least 85%, at least 90%, at least 95%, or at least 98% identity to the sequence of any one of the sequences of Table 1, e.g., SEQ ID NOs: 5, 8, 11, 14, 17, 20, 23, 26, 29, 32, 33, 34, 35, 47, 49, 59, 63, 65, 67, 69, 71, 73, 75, 77, 79, 81, 83, or 85. In some embodiments, the coronavirus antigen comprises a sequence having at least 85%, at least 90%, at least 95%, or at least 98% identity to the sequence of SEQ ID NO: 29. In some embodiments, the coronavirus antigen comprises the sequence of SEQ ID NO: 29. In some embodiments, the coronavirus antigen comprises a sequence having at least 85%, at least 90%, at least 95%, or at least 98% identity to the sequence of SEQ ID NO: 17. In some embodiments, the coronavirus antigen comprises the sequence of SEQ ID NO: 17. In some embodiments, the coronavirus antigen comprises a sequence having at least 85%, at least 90%, at least 95%, or at least 98% identity to the sequence of SEQ ID NO: 20. In some embodiments, the coronavirus antigen comprises the sequence of SEQ ID NO: 20. In some embodiments, the coronavirus antigen comprises a sequence having at least 85%, at least 90%, at least 95%, or at least 98% identity to the sequence of SEQ ID NO: 23. In some embodiments, the coronavirus antigen comprises the sequence of SEQ ID NO: 23. In some embodiments, the coronavirus antigen comprises a sequence having at least 85%, at least 90%, at least 95%, or at least 98% identity to the sequence of SEQ ID NO: 26. In some embodiments, the coronavirus antigen comprises the sequence of SEQ ID NO: 26.

[0016] In some embodiments, the structural protein is an M protein. In some embodiments, the M protein comprise a sequence having at least 80% identity to the sequence of SEQ ID NO: 81. In some embodiments, the M protein comprises a sequence having at least 85%, at least 90%, at least 95%, or at least 98% identity to the sequence of SEQ ID NO: 81. In some embodiments, the ORF comprises the sequence of SEQ ID NO: 80. In some embodiments, the RNA comprises a sequence having at least 85%, at least 90%, at least 95%, or at least 98% identity to the sequence of SEQ ID NO: 95. In some embodiments, the RNA comprises the sequence of SEQ ID NO: 95.

[0017] In some embodiments, the structural protein is an E protein. In some embodiments, the E protein comprises a sequence having at least 80% identity to the sequence of SEQ ID NO: 83. In some embodiments, the E protein comprises a sequence having at least 85%, at least 90%, at least 95%, or at least 98% identity to the sequence of SEQ ID NO: 83. In some embodiments, the ORF comprises the sequence of SEQ ID NO: 82. In some embodiments, the RNA comprises a sequence having at least 85%, at least 90%, at least 95%, or at least 98% identity to the sequence of SEQ ID NO: 96. In some embodiments, the RNA comprises the sequence of SEQ ID NO: 96.

[0018] In some embodiments, the structural protein is an NC protein. In some embodiments, the NC protein comprises a sequence having at least 80% identity to the sequence of SEQ ID NO: 85. In some embodiments, the NC protein comprises a sequence having at least 85%, at least 90%, at least 95%, or at least 98% identity to the sequence of SEQ ID NO: 85. In some embodiments, the ORF comprises the sequence of SEQ ID NO: 84. In some embodiments, the RNA comprises a sequence having at least 85%, at least 90%, at least 95%, or at least 98% identity to the sequence of SEQ ID NO: 97. In some embodiments, the RNA comprises the sequence of SEQ ID NO: 97.

[0019] In some embodiments, the ORF comprises the sequence of any one of the sequences of Table 1, e.g., any one of SEQ ID NOs: 3, 7, 10, 13, 16, 19, 22, 25, 28, 31, 48, 50, 52, 54, 56, 61, 62, 64, 66, 68, 70, 72, 74, 76, 78, 80, 82, 84, or 106. In some embodiments, mRNAs comprising the ORF are uniformly modified (e.g., fully modified, modified throughout the entire sequence) for a particular modification. For example, an RNA can be uniformly modified with 1-methyl-pseudouridine, such that each U in the sequence is a 1-methyl-pseudouridine.

[0020] In some embodiments, the RNA comprises a sequence having at least 85%, at least 90%, at least 95%, or at least 98% identity to the sequence of any one of the sequences of Table 1, e.g., any one of SEQ ID NOs: 1, 6, 9, 12, 15, 18, 21, 24, 27, 30, 51, 53, 55, 57, 58, 60, 86-97, or 105. In some embodiments, the RNA comprises a sequence having at least 85%, at least 90%, at least 95%, or at least 98% identity to the sequence of SEQ ID NO: 27. In some embodiments, the RNA comprises a sequence having at least 85%, at least 90%, at least 95%, or at least 98% identity to the sequence of SEQ ID NO: 105. In some embodiments, the RNA comprises a sequence having at least 85%, at least 90%, at least 95%, or at least 98% identity to the sequence of SEQ ID NO: 15. In some embodiments, the RNA comprises a sequence having at least 85%, at least 90%, at least 95%, or at least 98% identity to the sequence of SEQ ID NO: 18. In some embodiments, the RNA comprises a sequence having at least 85%, at least 90%, at least 95%, or at least 98% identity to the sequence of SEQ ID NO: 21. In some embodiments, the RNA comprises a sequence having at least 85%, at least 90%, at least 95%, or at least 98% identity to the sequence of SEQ ID NO: 24.

[0021] In some embodiments, the RNA comprises the sequence of any one of the sequences of Table 1, e.g., any one of SEQ ID NOs: 1, 6, 9, 12, 15, 18, 21, 24, 27, 30, 51, 53, 55, 57, 58, 60, 86-97, or 105. In some embodiments, the RNA comprises the sequence of SEQ ID NO: 27. In some embodiments, the RNA comprises the sequence of SEQ ID NO: 15. In some embodiments, the RNA comprises the sequence of SEQ ID NO: 18. In some embodiments, the RNA comprises the sequence of SEQ ID NO: 21. In some embodiments, the RNA comprises the sequence of SEQ ID NO: 24. In some embodiments, mRNAs are uniformly modified (e.g., fully modified, modified throughout the entire sequence) for a particular modification. For example, an RNA can be uniformly modified with 1-methyl-pseudouridine, such that each U in the sequence is a 1-methyl-pseudouridine.

[0022] In some embodiments, the RNA comprises a chemical modification. In some embodiments, the chemical modification is 1-methylpseudouridine (e.g., fully modified, modified throughout the entire sequence).

[0023] Some aspects of the present disclosure provide a method comprising codon optimizing the RNA of any one of the preceding embodiments.

[0024] In some embodiments, the RNA is formulated in a lipid nanoparticle.

[0025] In some embodiments, the lipid nanoparticle comprises a PEG-modified lipid, a non-cationic lipid, a sterol, an ionizable cationic lipid, or any combination thereof. In some embodiments, the lipid nanoparticle comprises 0.5-15 mol % (e.g., 0.5-10 mol %, 0.5-5 mol %, or 1-2 mol %) PEG-modified lipid; 5-25 mol % (e.g., 5-20 mol %, or 5-15 mol %) non-cationic (e.g., neutral) lipid; 25-55 mol % (e.g., 30-45 mol % or 35-40 mol %) sterol; and 20-60 mol % (e.g., 40-60 mol %, 40-50 mol %, 45-55 mol %, or 45-50 mol %) ionizable cationic lipid. In some embodiments, the PEG-modified lipid is 1,2 dimyristoyl-sn-glycerol, methoxypolyethyleneglycol (PEG2000 DMG), the non-cationic lipid is 1,2 distearoyl-sn-glycero-3-phosphocholine (DSPC), the sterol is cholesterol; and the ionizable cationic lipid has the structure of Compound 1:

[chemical structure]

[0026] Other aspects of the present disclosure provide a composition comprising the RNA of any one of the preceding embodiments and a mixture of lipids. In some embodiments, the mixture of lipids comprises a PEG-modified lipid, a non-cationic lipid, a sterol, an ionizable cationic lipid, or any combination thereof. In some embodiments, the mixture of lipids comprises 0.5-15 mol % (e.g., 0.5-10 mol %, 0.5-5 mol %, or 1-2 mol %) PEG-modified lipid; 5-25 mol % (e.g., 5-20 mol %, or 5-15 mol %) non-cationic (e.g., neutral) lipid; 25-55 mol % (e.g., 30-45 mol % or 35-40 mol %) sterol; and 20-60 mol % (e.g., 40-60 mol %, 40-50 mol %, 45-55 mol %, or 45-50 mol %) ionizable cationic lipid. In some embodiments, the PEG-modified lipid is 1,2 dimyristoyl-sn-glycerol, methoxypolyethyleneglycol (PEG2000 DMG), the non-cationic lipid is 1,2 distearoyl-sn-glycero-3-phosphocholine (DSPC), the sterol is cholesterol; and the ionizable cationic lipid has the structure of Compound 1.

[0027] In some embodiments, the mixture of lipids forms lipid nanoparticles. In some embodiments, the RNA is formulated in the lipid nanoparticles. In some embodiments, the lipid nanoparticles are formed first as empty lipid nanoparticles and combined with the mRNA of the vaccine immediately prior to (e.g., within a couple of minutes to an hour of) administration.

[0028] Yet other aspects of the present disclosure provide a method comprising administering to a subject the RNA of any one of the preceding embodiments in an amount effective to induce a neutralizing antibody response against a coronavirus in the subject.

[0029] Still other aspects of the present disclosure provide a method comprising administering to a subject the composition of any one of the preceding embodiments in an amount effective to induce a neutralizing antibody response and/or a T cell immune response, optionally a CD4⁺ and/or a CD8⁺ T cell immune response against a coronavirus in the subject.

[0030] In some embodiments, the coronavirus is a SARS-CoV-2.

[0031] In some embodiments, the subject is immunocompromised. In some embodiments, the subject has a pulmonary disease. In some embodiments, the subject is 5 years of age or younger, or 65 years of age or older.

[0032] In some embodiments, the method comprises administering to the subject at least two doses of the composition.

[0033] In some embodiments, detectable levels of the coronavirus antigen are produced in serum of the subject at 1-72 hours post administration of the RNA or composition comprising the RNA.

[0034] In some embodiments, a neutralizing antibody titer of at least 100 NU/ml, at least 500 NU/ml, or at least 1000 NU/ml is produced in the serum of the subject at 1-72 hours post administration of the RNA or composition comprising the RNA.

[0035] It should be understood that the terms “SARS-CoV-2,” “Wuhan coronavirus,” “2019 novel coronavirus,” and “2019-nCoV” refer to the same recently emerged betacoronavirus now known as SARS-CoV-2 and are used interchangeably herein.

[0036] The entire contents of International Application No. PCT/US2016/058327 (Publication No. WO2017/07062) and International Application No. PCT/US2018/022777 (Publication No. WO2018/170347) are incorporated herein by reference.

### BRIEF DESCRIPTION OF THE DRAWINGS

[0037] FIG. 1 shows schematics of various exemplary S protein antigen encoded by the SARS-CoV-2 mRNA of the present disclosure. The top schematic represents a wild-type SARS-CoV-2 protein; the schematics below depict SARS-CoV-2 protein variants, relative to the wild-type.

[0038] FIG. 2 shows a graph of 24 hour in vitro expression data for various SARS-CoV-2 protein variants encoded by the SARS-CoV-2 mRNA of the present disclosure.

[0039] FIG. 3 shows graph of 24 hour in vitro expression data for various SARS-CoV-2 protein variants encoded by the SARS-CoV-2 mRNA of the present disclosure. Two different amounts of mRNA were tested.

[0040] FIGS. 4A-4B show graphs of serum antibody titer measurements following immunization with different doses of the SARS-CoV-2 Variant 9 mRNA vaccine in different strains of mice (FIG. 4A) and at higher doses (FIG. 4B).

[0041] FIGS. 5A-5C show graphs of serum antibody titer measurements following immunization with different doses of the SARS-CoV-2 Variant 5 mRNA vaccine (FIG. 5A), compared to the SARS-CoV-2 Variant 9 mRNA vaccine and an mRNA encoding a wild-type SARS-CoV-2 S protein (FIG. 5B). FIG. 5C is a graph comparing the serum antibody titer for seven different SARS-CoV-2 mRNA vaccines and an mRNA encoding wild-type SARS-CoV-2 S protein Sequence.

[0042] FIG. 6 shows a graph of a temporal antibody response in mice after immunization with the SARS-CoV-2 Variant 9 mRNA at different doses.

[0043] FIG. 7 shows a schematic depicting dosing schedules.

[0044] FIGS. 8A-8C show graphs of serum antibody titers in mice two weeks after a priming dose of the SARS-CoV-2 Variant 9 mRNA vaccine and two weeks after a booster dose of the Wuahn-Hu-1 Variant 9 mRNA vaccine in BALB/c mice (FIG. 8A), C57BL/6 mice (FIG. 8B), and C3B6 mice (FIG. 8C). Various vaccine doses were tested.

[0045] FIGS. 9A-9E show graphs of serum antibody titers from mice two weeks after a priming dose of the SARS-CoV-2 Variant 5 mRNA vaccine and two weeks after a booster dose of the SARS-CoV-2 Variant 5 mRNA vaccine in BALB/c mice (FIG. 9A) and in C3B6 mice (FIG. 9B) or after a priming dose and booster dose of mRNA encoding wild-type SARS-CoV-2 protein (FIG. 9C). Various vaccine doses were tested. FIGS. 9D-9E show graphs comparing serum antibody titers in BALB/c mice (FIG. 9D) and in C3B6 mice (FIG. 9E) immunized with the SARS-CoV-2 Variant 9 mRNA vaccine, the SARS-CoV-2 Variant 5 mRNA vaccine, or mRNA encoding wild-type SARS-CoV-2 S protein.

[0046] FIG. 10 shows a graph comparing the serum antibody titer from mice immunized with one of seven different SARA-CoV-2 mRNA vaccines or an mRNA encoding wild-type SARS-CoV-2 S protein sequence following a booster dose.

[0047] FIGS. 11A-11B show graphs of the results of a flow cytometry analysis using the 5653-118 (“118”) antibody, which is specific for the N-terminal domain of SARS-CoV-1 S1 subunit, following immunization of mice with the SARS-CoV-2 Variant 9 mRNA vaccine, the SARS-CoV-2 Variant 5 mRNA vaccine, or the SARS-CoV-2 Variant 6 mRNA vaccine. The analysis was performed using lymph node (FIG. 11A) and spleen (FIG. 11B) samples obtained from the mice.

[0048] FIGS. 12A-12B show graphs of the results of a flow cytometry analysis using the 5652-109 (“109”) antibody, which is specific for the receptor-binding domain of SARS-CoV-1 S protein, following immunization of mice with the SARS-CoV-2 Variant 9 mRNA vaccine, the SARS-CoV-2 Variant 5 mRNA vaccine, or the SARS-CoV-2 Variant 6 mRNA vaccine. The analysis was performed using lymph node (FIG. 12A) and spleen (FIG. 12B) samples obtained from the mice.

[0049] FIGS. 13A-13C show graphs of the results of a flow cytometry analysis following transfection with one of six different SARS-CoV-2 mRNA vaccines in vitro. FIG. 13A shows the percentage of antigen-presenting cell-positive (APC+), and FIG. 13B shows the mean fluorescence intensity (MFI). FIG. 13C shows results using a positive control (a SARS antibody).

[0050] FIG. 14 shows graphs of the results from a flow cytometry analysis following transfection with the SARS-CoV-2 Variant 9 mRNA vaccine in vitro, using mAb118, mAb109, and SARS mAb103 (positive control). The negative control excluded a primary antibody.

[0051] FIG. 15 shows graphs of protein binding between mAb118 or mAb109 and a SARS-CoV-2 antigen at different concentrations.

[0052] FIGS. 16A-16B show graphs of binding and neutralizing antibodies in BALB/c mice vaccinated with 1 μg, 0.1 μg or 0.01 μg of the SARS-CoV-2 Variant 9 mRNA vaccine at weeks 0 and 3. FIG. 16A shows S-2P-binding antibodies assessed by ELISA at week 2 (post-prime) and week 5 (post-boost). FIG. 16B shows neutralizing activity assessed at week 5 by a pseudovirus neutralization assay in sera of mice that received 1 μg or 0.1 μg of the SARS-CoV-2 Variant 9 mRNA vaccine.

[0053] FIGS. 17A-17C show graphs of data demonstrating that SARS-CoV-2 Variant 9 mRNA vaccine-induced immunity prevents SARS-CoV-2 replication in the lungs of BALB/c mice. BALB/c mice were vaccinated with 1 μg, 0.1 μg or 0.01 μg of the SARS-CoV-2 Variant 9 mRNA vaccine at weeks 0 and 3 and challenged at week 9 with mouse-adapted SARS-CoV-2.

[0054] FIG. 17A shows viral titers in lung assessed by plaque assay on day 2 post-challenge. FIG. 17B shows viral titers in nasal turbinates assessed by plaque assay on day 2 post-challenge. FIG. 17C shows the change in body weight (as a percentage) over time following infection.

[0055] FIGS. 18A-18C show graphs of data demonstrating that SARS-CoV-2 Variant 9 mRNA vaccine-induced immunity prevents SARS-CoV-2 replication in the lungs of BALB/c mice. BALB/c mice were vaccinated with 1 μg, 0.1 μg or 0.01 μg of the SARS-CoV-2 Variant 9 mRNA vaccine at week 0 and challenged at week 7 with mouse-adapted SARS-CoV-2. FIG. 18A shows viral titers in nasal turbinates assessed by plaque assay on day 2 post-challenge. FIG. 18B shows viral titers in lung assessed by plaque assay on day 2 post-challenge. FIG. 18C shows the change in body weight (as a percentage) over time following infection.

[0056] FIG. 19 shows the week 0 and 3 immunization schedule used in Example 10.

[0057] FIGS. 20A-20C show graphs of data demonstrating that SARS-CoV-2 Variant 9 mRNA vaccine-induced immunity prevents SARS-CoV-2 replication in the lungs of BALB/c mice. BALB/c mice were vaccinated with 10 μg, 1 μg or 0.1 μg of SARS-CoV-2 Variant 9 at weeks 0 and 4 and challenged at week 7 with mouse-adapted SARS-CoV-2. FIG. 20A shows viral titers in nasal turbinates assessed by plaque assay on day 2 post-challenge. FIG. 20B shows viral titers in lung assessed by plaque assay on day 2 post-challenge. FIG. 20C shows the change in body weight (as a percentage) over time following infection.

[0058] FIGS. 21A-21H show graphs of data relating to neutralizing antibody responses following mRNA immunization of BALB/c mice. Sigmoidal curves, taking averages of triplicates at each serum dilution, were generated from relative luciferase units (RLU) readings and 50% (IC₅₀) (FIGS. 21A, 21C, 21E, 21G) and 80% (IC₈₀) (FIGS. 21B, 21D, 21F, 21H) neutralizing activity was calculated considering uninfected cells to represent 100% neutralization and cells transduced with only virus to represent 0% neutralization. Each symbol represents an individual mouse, bars represent geometric mean titers (GMT), and error bars indicate geometric standard deviation (SD). FIGS. 21A-21F show unpaired T-tests used to compare 0.1 μg and 1 μg doses. FIGS. 21G and 21H show groups compared by one-way ANOVA with Kruskal-Wallis multiple comparison test.

[0059] FIGS. 22A-22C show graphs of data relating to binding and neutralizing antibody responses following low dose mRNA immunization of BALB/c mice with alternative spike antigen designs. FIG. 22A shows serum endpoint titers. FIG. 22B shows 50% (IC₅₀) neutralizing activity calculated considering uninfected cells representing 100% neutralization and cells transduced with only virus representing 0% neutralization. Each symbol represents an individual mouse, bars represent geometric mean titers (GMT), and error bars indicate geometric standard deviation (SD). In FIGS. 22A and 22B, groups were compared by one-way ANOVA with Kruskal-Wallis multiple comparison test. FIG. 22C shows antibody binding and neutralization titers compared by Spearman correlation.

### DETAILED DESCRIPTION

[0060] The present disclosure provides compositions (e.g., immunizing/immunogenic compositions such as RNA vaccines in lipid nanoparticles) that elicit potent neutralizing antibodies against coronavirus antigens. In some embodiments, an immunizing composition includes RNA (e.g., messenger RNA (mRNA)) encoding a coronavirus antigen, such as a SARS-CoV-2 antigen in a lipid nanoparticle. In some embodiments, the coronavirus antigen is a structural protein. In some embodiments, the coronavirus antigen is a spike protein, an envelope protein, a nucleocapsid protein, or a membrane protein. In some embodiments, the coronavirus antigen is a stabilized prefusion spike protein. In some embodiments, the mRNA comprises an open reading frame that encodes a variant trimeric spike protein. The trimeric spike protein, for example, may comprise a stabilized prefusion spike protein. In some embodiments, the stabilized prefusion spike protein a double proline (S2P) mutation.

### Antigens

[0061] Antigens, as used herein, are proteins capable of inducing an immune response (e.g., causing an immune system to produce antibodies against the antigens). Herein, use of the term “antigen” encompasses immunogenic proteins and immunogenic fragments (an immunogenic fragment that induces (or is capable of inducing) an immune response to a (at least one) coronavirus), unless otherwise stated. It should be understood that the term “protein” encompasses peptides and the term “antigen” encompasses antigenic fragments. Other molecules may be antigenic such as bacterial polysaccharides or combinations of protein and polysaccharide structures, but for the viral vaccines included herein, viral proteins, fragments of viral proteins and designed and or mutated proteins derived from the betacoronavirus SARS-CoV-2 are the antigens provided herein.

[0062] The mRNA provided herein, in some embodiments, comprises an open reading frame encoding a variant trimeric spike protein. In some embodiments, the open reading frame encodes a variant trimeric spike protein that comprises a stabilized prefusion spike protein. The stabilized prefusion spike protein, in some embodiments, comprises a double proline (S2P) mutation.

[0063] Exemplary sequences of the coronavirus antigens and the RNA (e.g., mRNA) encoding the coronavirus antigens of the compositions of the present disclosure are provided in Table 1.

[0064] In some embodiments, a composition comprises an RNA (e.g., mRNA) that encodes a coronavirus antigen that comprises an amino acid sequence having at least 80%, at least 85%, at least 90%, at least 95%, at least 98%, or 100% identity to the amino acid sequence of any one of SEQ ID NOs: 5, 8, 11, 14, 17, 20, 23, 26, 29, 32, 33, 34, 35, 47, 49, 59, 63, 65, 67, 69, 71, 73, 75, 77, 79, 81, 83, or 85 and optionally a lipid nanoparticle. In some embodiments, a composition comprises an RNA (e.g., mRNA) that encodes a coronavirus antigen that comprises the sequence of SEQ ID NO: 29. In some embodiments, a composition comprises an RNA (e.g., mRNA) that encodes a coronavirus antigen that comprises the sequence of SEQ ID NO: 17. In some embodiments, a composition comprises an RNA (e.g., mRNA) that encodes a coronavirus antigen that comprises the sequence of SEQ ID NO: 20. In some embodiments, a composition comprises an RNA (e.g., mRNA) that encodes a coronavirus antigen that comprises the sequence of SEQ ID NO: 23. In some embodiments, a composition comprises an RNA (e.g., mRNA) that encodes a coronavirus antigen that comprises the sequence of SEQ ID NO: 26.

[0065] It should be understood that any one of the antigens encoded by the RNA described herein may or may not comprise a signal sequence.

### Nucleic Acids

[0066] The compositions of the present disclosure comprise a (at least one) RNA having an open reading frame (ORF) encoding a coronavirus antigen (e.g., variant trimeric spike protein, such as a stabilized prefusion spike protein). In some embodiments, the RNA is a messenger RNA (mRNA). In some embodiments, the RNA (e.g., mRNA) further comprises a 5′ UTR, 3′ UTR, a poly(A) tail and/or a 5′ cap analog.

[0067] It should also be understood that the coronavirus vaccine of the present disclosure may include any 5′ untranslated region (UTR) and/or any 3′ UTR. Exemplary UTR sequences are provided in the Sequence Listing (e.g., SEQ ID NOs: 2, 36, 4, or 37); however, other UTR sequences may be used or exchanged for any of the UTR sequences described herein. UTRs may also be omitted from the RNA polynucleotides provided herein.

[0068] Nucleic acids comprise a polymer of nucleotides (nucleotide monomers). Thus, nucleic acids are also referred to as polynucleotides. Nucleic acids may be or may include, for example, deoxyribonucleic acids (DNAs), ribonucleic acids (RNAs), threose nucleic acids (TNAs), glycol nucleic acids (GNAs), peptide nucleic acids (PNAs), locked nucleic acids (LNAs, including LNA having a β-D-ribo configuration, α-LNA having an α-L-ribo configuration (a diastereomer of LNA), 2′-amino-LNA having a 2′-amino functionalization, and 2′-amino-α-LNA having a 2′-amino functionalization), ethylene nucleic acids (ENA), cyclohexenyl nucleic acids (CeNA) and/or chimeras and/or combinations thereof.

[0069] Messenger RNA (mRNA) is any RNA that encodes a (at least one) protein (a naturally-occurring, non-naturally-occurring, or modified polymer of amino acids) and can be translated to produce the encoded protein in vitro, in vivo, in situ, or ex vivo. The skilled artisan will appreciate that, except where otherwise noted, nucleic acid sequences set forth in the instant application may recite “T”s in a representative DNA sequence but where the sequence represents RNA (e.g., mRNA), the “T”s would be substituted for “U”s. Thus, any of the DNAs disclosed and identified by a particular sequence identification number herein also disclose the corresponding RNA (e.g., mRNA) sequence complementary to the DNA, where each “T” of the DNA sequence is substituted with “U.”

[0070] An open reading frame (ORF) is a continuous stretch of DNA or RNA beginning with a start codon (e.g., methionine (ATG or AUG)) and ending with a stop codon (e.g., TAA, TAG or TGA, or UAA, UAG or UGA). An ORF typically encodes a protein. It will be understood that the sequences disclosed herein may further comprise additional elements, e.g., 5′ and 3′ UTRs, but that those elements, unlike the ORF, need not necessarily be present in an RNA polynucleotide of the present disclosure.

[0071] In some embodiments, a composition comprises an RNA (e.g., mRNA) that comprises a nucleotide sequence having at least 80%, at least 85%, at least 90%, at least 95%, at least 98%, or 100% identity to the nucleotide sequence of any one of SEQ ID NOs: 1, 6, 9, 12, 15, 18, 21, 24, 27, 30, 51, 53, 55, 57, 58, 60, or 86-97.

[0072] In some embodiments, a composition comprises an RNA (e.g., mRNA) that comprises an ORF that comprises a nucleotide sequence having at least 80%, at least 85%, at least 90%, at least 95%, at least 98%, or 100% identity to the nucleotide sequence of any one of SEQ ID NOs: 3, 7, 10, 13, 16, 19, 22, 25, 28, 31, 48, 50, 52, 54, 56, 61, 62, 64, 66, 68, 70, 72, 74, 76, 78, 80, 82, or 84.

### Variants

[0073] In some embodiments, the compositions of the present disclosure include RNA that encodes a coronavirus antigen variant (e.g., variant trimeric spike protein, such as a stabilized prefusion spike protein). Antigen variants or other polypeptide variants refers to molecules that differ in their amino acid sequence from a wild-type, native, or reference sequence. The antigen/polypeptide variants may possess substitutions, deletions, and/or insertions at certain positions within the amino acid sequence, as compared to a native or reference sequence. Ordinarily, variants possess at least 50% identity to a wild-type, native or reference sequence. In some embodiments, variants share at least 80%, or at least 90% identity with a wild-type, native, or reference sequence.

[0074] Variant antigens/polypeptides encoded by nucleic acids of the disclosure may contain amino acid changes that confer any of a number of desirable properties, e.g., that enhance their immunogenicity, enhance their expression, and/or improve their stability or PK/PD properties in a subject. Variant antigens/polypeptides can be made using routine mutagenesis techniques and assayed as appropriate to determine whether they possess the desired property. Assays to determine expression levels and immunogenicity are well known in the art and exemplary such assays are set forth in the Examples section. Similarly, PK/PD properties of a protein variant can be measured using art recognized techniques, e.g., by determining expression of antigens in a vaccinated subject over time and/or by looking at the durability of the induced immune response. The stability of protein(s) encoded by a variant nucleic acid may be measured by assaying thermal stability or stability upon urea denaturation or may be measured using in silico prediction. Methods for such experiments and in silico determinations are known in the art.

[0075] In some embodiments, a composition comprises an RNA or an RNA ORF that comprises a nucleotide sequence of any one of the sequences provided herein (see, e.g., Sequence Listing and Table 1), or comprises a nucleotide sequence at least 80%, at least 85%, at least 90%, at least 95%, at least 96%, at least 97%, at least 98%, or at least 99% identical to a nucleotide sequence of any one of the sequences provided herein.

[0076] The term “identity” refers to a relationship between the sequences of two or more polypeptides (e.g. antigens) or polynucleotides (nucleic acids), as determined by comparing the sequences. Identity also refers to the degree of sequence relatedness between or among sequences as determined by the number of matches between strings of two or more amino acid residues or nucleic acid residues. Identity measures the percent of identical matches between the smaller of two or more sequences with gap alignments (if any) addressed by a particular mathematical model or computer program (e.g., “algorithms”). Identity of related antigens or nucleic acids can be readily calculated by known methods. “Percent (%) identity” as it applies to polypeptide or polynucleotide sequences is defined as the percentage of residues (amino acid residues or nucleic acid residues) in the candidate amino acid or nucleic acid sequence that are identical with the residues in the amino acid sequence or nucleic acid sequence of a second sequence after aligning the sequences and introducing gaps, if necessary, to achieve the maximum percent identity. Methods and computer programs for the alignment are well known in the art. It is understood that identity depends on a calculation of percent identity but may differ in value due to gaps and penalties introduced in the calculation. Generally, variants of a particular polynucleotide or polypeptide (e.g., antigen) have at least 40%, 45%, 50%, 55%, 60%, 65%, 70%, 75%, 80%, 85%, 90%, 91%, 92%, 93%, 94%, 95%, 96%, 97%, 98%, 99% but less than 100% sequence identity to that particular reference polynucleotide or polypeptide as determined by sequence alignment programs and parameters described herein and known to those skilled in the art. Such tools for alignment include those of the BLAST suite (Stephen F. Altschul, et al (1997), “Gapped BLAST and PSI-BLAST: a new generation of protein database search programs”, Nucleic Acids Res. 25:3389-3402). Another popular local alignment technique is based on the Smith-Waterman algorithm (Smith, T. F. & Waterman, M. S. (1981) “Identification of common molecular subsequences.” J. Mol. Biol. 147:195-197). A general global alignment technique based on dynamic programming is the Needleman—Wunsch algorithm (Needleman, S. B. & Wunsch, C. D. (1970) “A general method applicable to the search for similarities in the amino acid sequences of two proteins.” J. Mol. Biol. 48:443-453). More recently a Fast Optimal Global Sequence Alignment Algorithm (FOGSAA) has been developed that purportedly produces global alignment of nucleotide and protein sequences faster than other optimal global alignment methods, including the Needleman—Wunsch algorithm.

[0077] As such, polynucleotides encoding peptides or polypeptides containing substitutions, insertions and/or additions, deletions and covalent modifications with respect to reference sequences, in particular the polypeptide (e.g., antigen) sequences disclosed herein, are included within the scope of this disclosure. For example, sequence tags or amino acids, such as one or more lysines, can be added to peptide sequences (e.g., at the N-terminal or C-terminal ends). Sequence tags can be used for peptide detection, purification or localization. Lysines can be used to increase peptide solubility or to allow for biotinylation. Alternatively, amino acid residues located at the carboxy and amino terminal regions of the amino acid sequence of a peptide or protein may optionally be deleted providing for truncated sequences. Certain amino acids (e.g., C-terminal or N-terminal residues) may alternatively be deleted depending on the use of the sequence, as for example, expression of the sequence as part of a larger sequence which is soluble or linked to a solid support. In some embodiments, sequences for (or encoding) signal sequences, termination sequences, transmembrane domains, linkers, multimerization domains (such as, e.g., foldon regions) and the like may be substituted with alternative sequences that achieve the same or a similar function. In some embodiments, cavities in the core of proteins can be filled to improve stability, e.g., by introducing larger amino acids. In other embodiments, buried hydrogen bond networks may be replaced with hydrophobic resides to improve stability. In yet other embodiments, glycosylation sites may be removed and replaced with appropriate residues. Such sequences are readily identifiable to one of skill in the art. It should also be understood that some of the sequences provided herein contain sequence tags or terminal peptide sequences (e.g., at the N-terminal or C-terminal ends) that may be deleted, for example, prior to use in the preparation of an RNA (e.g., mRNA) vaccine.

[0078] As recognized by those skilled in the art, protein fragments, functional protein domains, and homologous proteins are also considered to be within the scope of coronavirus antigens of interest. For example, provided herein is any protein fragment (meaning a polypeptide sequence at least one amino acid residue shorter than a reference antigen sequence but otherwise identical) of a reference protein, provided that the fragment is immunogenic and confers a protective immune response to the coronavirus. In addition to variants that are identical to the reference protein but are truncated, in some embodiments, an antigen includes 2, 3, 4, 5, 6, 7, 8, 9, 10, or more mutations, as shown in any of the sequences provided or referenced herein. Antigens/antigenic polypeptides can range in length from about 4, 6, or 8 amino acids to full length proteins.

### Stabilizing Elements

[0079] Naturally-occurring eukaryotic mRNA molecules can contain stabilizing elements, including, but not limited to untranslated regions (UTR) at their 5′-end (5′ UTR) and/or at their 3′-end (3′ UTR), in addition to other structural features, such as a 5′-cap structure or a 3′-poly(A) tail. Both the 5′ UTR and the 3′ UTR are typically transcribed from the genomic DNA and are elements of the premature mRNA. Characteristic structural features of mature mRNA, such as the 5′-cap and the 3′-poly(A) tail are usually added to the transcribed (premature) mRNA during mRNA processing.

[0080] In some embodiments, a composition includes an RNA polynucleotide having an open reading frame encoding at least one antigenic polypeptide having at least one modification, at least one 5′ terminal cap, and is formulated within a lipid nanoparticle. 5′-capping of polynucleotides may be completed concomitantly during the in vitro-transcription reaction using the following chemical RNA cap analogs to generate the 5′-guanosine cap structure according to manufacturer protocols: 3′-O-Me-m7G(5′)ppp(5′) G [the ARCA cap];G(5′)ppp(5′)A; G(5′)ppp(5′)G; m7G(5′)ppp(5′)A; m7G(5′)ppp(5′)G (New England BioLabs, Ipswich, Mass.). 5′-capping of modified RNA may be completed post-transcriptionally using a Vaccinia Virus Capping Enzyme to generate the “Cap 0” structure: m7G(5′)ppp(5′)G (New England BioLabs, Ipswich, Mass.). Cap 1 structure may be generated using both Vaccinia Virus Capping Enzyme and a 2′-O methyl-transferase to generate: m7G(5′)ppp(5′)G-2′-O-methyl. Cap 2 structure may be generated from the Cap 1 structure followed by the 2′-O-methylation of the 5′-antepenultimate nucleotide using a 2′-O methyl-transferase. Cap 3 structure may be generated from the Cap 2 structure followed by the 2′-O-methylation of the 5′-preantepenultimate nucleotide using a 2′-O methyl-transferase. Enzymes may be derived from a recombinant source.

[0081] The 3′-poly(A) tail is typically a stretch of adenine nucleotides added to the 3′-end of the transcribed mRNA. It can, in some instances, comprise up to about 400 adenine nucleotides. In some embodiments, the length of the 3′-poly(A) tail may be an essential element with respect to the stability of the individual mRNA.

[0082] In some embodiments, a composition includes a stabilizing element. Stabilizing elements may include for instance a histone stem-loop. A stem-loop binding protein (SLBP), a 32 kDa protein has been identified. It is associated with the histone stem-loop at the 3′-end of the histone messages in both the nucleus and the cytoplasm. Its expression level is regulated by the cell cycle; it peaks during the S-phase, when histone mRNA levels are also elevated. The protein has been shown to be essential for efficient 3′-end processing of histone pre-mRNA by the U7 snRNP. SLBP continues to be associated with the stem-loop after processing, and then stimulates the translation of mature histone mRNAs into histone proteins in the cytoplasm. The RNA binding domain of SLBP is conserved through metazoa and protozoa; its binding to the histone stem-loop depends on the structure of the loop. The minimum binding site includes at least three nucleotides 5′ and two nucleotides 3′ relative to the stem-loop.

[0083] In some embodiments, an RNA (e.g., mRNA) includes a coding region, at least one histone stem-loop, and optionally, a poly(A) sequence or polyadenylation signal. The poly(A) sequence or polyadenylation signal generally should enhance the expression level of the encoded protein. The encoded protein, in some embodiments, is not a histone protein, a reporter protein (e.g. Luciferase, GFP, EGFP, β-Galactosidase, EGFP), or a marker or selection protein (e.g. alpha-Globin, Galactokinase and Xanthine:guanine phosphoribosyl transferase (GPT)).

[0084] In some embodiments, an RNA (e.g., mRNA) includes the combination of a poly(A) sequence or polyadenylation signal and at least one histone stem-loop, even though both represent alternative mechanisms in nature, acts synergistically to increase the protein expression beyond the level observed with either of the individual elements. The synergistic effect of the combination of poly(A) and at least one histone stem-loop does not depend on the order of the elements or the length of the poly(A) sequence.

[0085] In some embodiments, an RNA (e.g., mRNA) does not include a histone downstream element (HDE). “Histone downstream element” (HDE) includes a purine-rich polynucleotide stretch of approximately 15 to 20 nucleotides 3′ of naturally occurring stem-loops, representing the binding site for the U7 snRNA, which is involved in processing of histone pre-mRNA into mature histone mRNA. In some embodiments, the nucleic acid does not include an intron.

[0086] An RNA (e.g., mRNA) may or may not contain an enhancer and/or promoter sequence, which may be modified or unmodified or which may be activated or inactivated. In some embodiments, the histone stem-loop is generally derived from histone genes and includes an intramolecular base pairing of two neighbored partially or entirely reverse complementary sequences separated by a spacer, consisting of a short sequence, which forms the loop of the structure. The unpaired loop region is typically unable to base pair with either of the stem loop elements. It occurs more often in RNA, as is a key component of many RNA secondary structures but may be present in single-stranded DNA as well. Stability of the stem-loop structure generally depends on the length, number of mismatches or bulges, and base composition of the paired region. In some embodiments, wobble base pairing (non-Watson-Crick base pairing) may result. In some embodiments, the at least one histone stem-loop sequence comprises a length of 15 to 45 nucleotides.

[0087] In some embodiments, an RNA (e.g., mRNA) has one or more AU-rich sequences removed. These sequences, sometimes referred to as AURES are destabilizing sequences found in the 3′UTR. The AURES may be removed from the RNA vaccines. Alternatively, the AURES may remain in the RNA vaccine.

### Signal Peptides

[0088] In some embodiments, a composition comprises an RNA (e.g., mRNA) having an ORF that encodes a signal peptide fused to the coronavirus antigen. Signal peptides, comprising the N-terminal 15-60 amino acids of proteins, are typically needed for the translocation across the membrane on the secretory pathway and, thus, universally control the entry of most proteins both in eukaryotes and prokaryotes to the secretory pathway. In eukaryotes, the signal peptide of a nascent precursor protein (pre-protein) directs the ribosome to the rough endoplasmic reticulum (ER) membrane and initiates the transport of the growing peptide chain across it for processing. ER processing produces mature proteins, wherein the signal peptide is cleaved from precursor proteins, typically by a ER-resident signal peptidase of the host cell, or they remain uncleaved and function as a membrane anchor. A signal peptide may also facilitate the targeting of the protein to the cell membrane.

[0089] A signal peptide may have a length of 15-60 amino acids. For example, a signal peptide may have a length of 15, 16, 17, 18, 19, 20, 21, 22, 23, 24, 25, 26, 27, 28, 29, 30, 31, 32, 33, 34, 35, 36, 37, 38, 39, 40, 41, 42, 43, 44, 45, 46, 47, 48, 49, 50, 51, 52, 53, 54, 55, 56, 57, 58, 59, or 60 amino acids. In some embodiments, a signal peptide has a length of 20-60, 25-60, 30-60, 35-60, 40-60, 45-60, 50-60, 55-60, 15-55, 20-55, 25-55, 30-55, 35-55, 40-55, 45-55, 50-55, 15-50, 20-50, 25-50, 30-50, 35-50, 40-50, 45-50, 15-45, 20-45, 25-45, 30-45, 35-45, 40-45, 15-40, 20-40, 25-40, 30-40, 35-40, 15-35, 20-35, 25-35, 30-35, 15-30, 20-30, 25-30, 15-25, 20-25, or 15-20 amino acids.

[0090] Signal peptides from heterologous genes (which regulate expression of genes other than coronavirus antigens in nature) are known in the art and can be tested for desired properties and then incorporated into a nucleic acid of the disclosure. In some embodiments, the signal peptide may comprise one of the following sequences: MDSKGSSQKGSRLLLLLVVSNLLLPQGVVG (SEQ ID NO: 38), MDWTWILFLVAAATRVHS (SEQ ID NO: 39); METPAQLLFLLLLWLPDTTG (SEQ ID NO: 40); MLGSNSGQRVVFTILLLLVAPAYS (SEQ ID NO: 41); MKCLLYLAFLFIGVNCA (SEQ ID NO: 42); MWLVSLAIVTACAGA (SEQ ID NO: 43); or MFVFLVLLPLVSSQC (SEQ ID NO: 99).

### Fusion Proteins

[0091] In some embodiments, a composition of the present disclosure includes an RNA (e.g., mRNA) encoding an antigenic fusion protein. Thus, the encoded antigen or antigens may include two or more proteins (e.g., protein and/or protein fragment) joined together. Alternatively, the protein to which a protein antigen is fused does not promote a strong immune response to itself, but rather to the coronavirus antigen. Antigenic fusion proteins, in some embodiments, retain the functional property from each original protein.

### Scaffold Moieties

[0092] The RNA (e.g., mRNA) vaccines as provided herein, in some embodiments, encode fusion proteins that comprise coronavirus antigens linked to scaffold moieties. In some embodiments, such scaffold moieties impart desired properties to an antigen encoded by a nucleic acid of the disclosure. For example, scaffold proteins may improve the immunogenicity of an antigen, e.g., by altering the structure of the antigen, altering the uptake and processing of the antigen, and/or causing the antigen to bind to a binding partner.

[0093] In some embodiments, the scaffold moiety is protein that can self-assemble into protein nanoparticles that are highly symmetric, stable, and structurally organized, with diameters of 10-150 nm, a highly suitable size range for optimal interactions with various cells of the immune system. In some embodiments, viral proteins or virus-like particles can be used to form stable nanoparticle structures. Examples of such viral proteins are known in the art. For example, in some embodiments, the scaffold moiety is a hepatitis B surface antigen (HBsAg). HBsAg forms spherical particles with an average diameter of ˜22 nm and which lacked nucleic acid and hence are non-infectious (Lopez-Sagaseta, J. et al. Computational and Structural Biotechnology Journal 14 (2016) 58-68). In some embodiments, the scaffold moiety is a hepatitis B core antigen (HBcAg) self-assembles into particles of 24-31 nm diameter, which resembled the viral cores obtained from HBV-infected human liver. HBcAg produced in self-assembles into two classes of differently sized nanoparticles of 300 Å and 360 Å diameter, corresponding to 180 or 240 protomers. In some embodiments, the coronavirus antigen is fused to HBsAG or HBcAG to facilitate self-assembly of nanoparticles displaying the coronavirus antigen.

[0094] In some embodiments, bacterial protein platforms may be used. Non-limiting examples of these self-assembling proteins include ferritin, lumazine and encapsulin.

[0095] Ferritin is a protein whose main function is intracellular iron storage. Ferritin is made of 24 subunits, each composed of a four-alpha-helix bundle, that self-assemble in a quaternary structure with octahedral symmetry (Cho K. J. et al. J Mol Biol. 2009; 390:83-98). Several high-resolution structures of ferritin have been determined, confirming that Helicobacter pylori ferritin is made of 24 identical protomers, whereas in animals, there are ferritin light and heavy chains that can assemble alone or combine with different ratios into particles of 24 subunits (Granier T. et al. J Biol Inorg Chem. 2003; 8:105-111; Lawson D. M. et al. Nature. 1991; 349:541-544). Ferritin self-assembles into nanoparticles with robust thermal and chemical stability. Thus, the ferritin nanoparticle is well-suited to carry and expose antigens.

[0096] Lumazine synthase (LS) is also well-suited as a nanoparticle platform for antigen display. LS, which is responsible for the penultimate catalytic step in the biosynthesis of riboflavin, is an enzyme present in a broad variety of organisms, including archaea, bacteria, fungi, plants, and eubacteria (Weber S. E. Flavins and Flavoproteins. Methods and Protocols, Series: Methods in Molecular Biology. 2014). The LS monomer is 150 amino acids long, and consists of beta-sheets along with tandem alpha-helices flanking its sides. A number of different quaternary structures have been reported for LS, illustrating its morphological versatility: from homopentamers up to symmetrical assemblies of 12 pentamers forming capsids of 150 Å diameter. Even LS cages of more than 100 subunits have been described (Zhang X. et al. J Mol Biol. 2006; 362:753-770).

[0097] Encapsulin, a novel protein cage nanoparticle isolated from thermophile Thermotoga maritima, may also be used as a platform to present antigens on the surface of self-assembling nanoparticles. Encapsulin is assembled from 60 copies of identical 31 kDa monomers having a thin and icosahedral T=1 symmetric cage structure with interior and exterior diameters of 20 and 24 nm, respectively (Sutter M. et al. Nat Struct Mol Biol. 2008, 15: 939-947). Although the exact function of encapsulin in T. maritima is not clearly understood yet, its crystal structure has been recently solved and its function was postulated as a cellular compartment that encapsulates proteins such as DyP (Dye decolorizing peroxidase) and Flp (Ferritin like protein), which are involved in oxidative stress responses (Rahmanpour R. et al. FEBS J. 2013, 280: 2097-2104).

[0098] In some embodiments, an RNA of the present disclosure encodes a coronavirus antigen (e.g., SARS-CoV-2 S protein) fused to a foldon domain. The foldon domain may be, for example, obtained from bacteriophage T4 fibritin (see, e.g., Tao Y, et al. Structure. 1997 June 15; 5(6):789-98).

### Linkers and Cleavable Peptides

[0099] In some embodiments, the mRNAs of the disclosure encode more than one polypeptide, referred to herein as fusion proteins. In some embodiments, the mRNA further encodes a linker located between at least one or each domain of the fusion protein. The linker can be, for example, a cleavable linker or protease-sensitive linker. In some embodiments, the linker is selected from the group consisting of F2A linker, P2A linker, T2A linker, E2A linker, and combinations thereof. This family of self-cleaving peptide linkers, referred to as 2A peptides, has been described in the art (see for example, Kim, J. H. et al. (2011) PLoS ONE 6:e18556). In some embodiments, the linker is an F2A linker. In some embodiments, the linker is a GGGS (SEQ ID NO: 98) linker. In some embodiments, the fusion protein contains three domains with intervening linkers, having the structure: domain-linker-domain-linker-domain.

[0100] Cleavable linkers known in the art may be used in connection with the disclosure. Exemplary such linkers include: F2A linkers, T2A linkers, P2A linkers, E2A linkers (See, e.g., WO2017/127750). The skilled artisan will appreciate that other art-recognized linkers may be suitable for use in the constructs of the disclosure (e.g., encoded by the nucleic acids of the disclosure). The skilled artisan will likewise appreciate that other polycistronic constructs (mRNA encoding more than one antigen/polypeptide separately within the same molecule) may be suitable for use as provided herein.

### Sequence Optimization

[0101] In some embodiments, an ORF encoding an antigen of the disclosure is codon optimized. Codon optimization methods are known in the art. For example, an ORF of any one or more of the sequences provided herein may be codon optimized. Codon optimization, in some embodiments, may be used to match codon frequencies in target and host organisms to ensure proper folding; bias GC content to increase mRNA stability or reduce secondary structures; minimize tandem repeat codons or base runs that may impair gene construction or expression; customize transcriptional and translational control regions; insert or remove protein trafficking sequences; remove/add post translation modification sites in encoded protein (e.g., glycosylation sites); add, remove or shuffle protein domains; insert or delete restriction sites; modify ribosome binding sites and mRNA degradation sites; adjust translational rates to allow the various domains of the protein to fold properly; or reduce or eliminate problem secondary structures within the polynucleotide. Codon optimization tools, algorithms and services are known in the art—non-limiting examples include services from GeneArt (Life Technologies), DNA2.0 (Menlo Park Calif.) and/or proprietary methods. In some embodiments, the open reading frame (ORF) sequence is optimized using optimization algorithms.

[0102] In some embodiments, a codon optimized sequence shares less than 95% sequence identity to a naturally-occurring or wild-type sequence ORF (e.g., a naturally-occurring or wild-type mRNA sequence encoding a coronavirus antigen). In some embodiments, a codon optimized sequence shares less than 90% sequence identity to a naturally-occurring or wild-type sequence (e.g., a naturally-occurring or wild-type mRNA sequence encoding a coronavirus antigen). In some embodiments, a codon optimized sequence shares less than 85% sequence identity to a naturally-occurring or wild-type sequence (e.g., a naturally-occurring or wild-type mRNA sequence encoding a coronavirus antigen). In some embodiments, a codon optimized sequence shares less than 80% sequence identity to a naturally-occurring or wild-type sequence (e.g., a naturally-occurring or wild-type mRNA sequence encoding a coronavirus antigen). In some embodiments, a codon optimized sequence shares less than 75% sequence identity to a naturally-occurring or wild-type sequence (e.g., a naturally-occurring or wild-type mRNA sequence encoding a coronavirus antigen).

[0103] In some embodiments, a codon optimized sequence shares between 65% and 85% (e.g., between about 67% and about 85% or between about 67% and about 80%) sequence identity to a naturally-occurring or wild-type sequence (e.g., a naturally-occurring or wild-type mRNA sequence encoding a coronavirus antigen). In some embodiments, a codon optimized sequence shares between 65% and 75% or about 80% sequence identity to a naturally-occurring or wild-type sequence (e.g., a naturally-occurring or wild-type mRNA sequence encoding a coronavirus antigen).

[0104] In some embodiments, a codon-optimized sequence encodes an antigen that is as immunogenic as, or more immunogenic than (e.g., at least 10%, at least 20%, at least 30%, at least 40%, at least 50%, at least 100%, or at least 200% more), than a coronavirus antigen encoded by a non-codon-optimized sequence.

[0105] When transfected into mammalian host cells, the modified mRNAs have a stability of between 12-18 hours, or greater than 18 hours, e.g., 24, 36, 48, 60, 72, or greater than 72 hours and are capable of being expressed by the mammalian host cells.

[0106] In some embodiments, a codon optimized RNA may be one in which the levels of G/C are enhanced. The G/C-content of nucleic acid molecules (e.g., mRNA) may influence the stability of the RNA. RNA having an increased amount of guanine (G) and/or cytosine (C) residues may be functionally more stable than RNA containing a large amount of adenine (A) and thymine (T) or uracil (U) nucleotides. As an example, WO02/098443 discloses a pharmaceutical composition containing an mRNA stabilized by sequence modifications in the translated region. Due to the degeneracy of the genetic code, the modifications work by substituting existing codons for those that promote greater RNA stability without changing the resulting amino acid. The approach is limited to coding regions of the RNA.

### Chemically Unmodified Nucleotides

[0107] In some embodiments, an RNA (e.g., mRNA) is not chemically modified and comprises the standard ribonucleotides consisting of adenosine, guanosine, cytosine and uridine. In some embodiments, nucleotides and nucleosides of the present disclosure comprise standard nucleoside residues such as those present in transcribed RNA (e.g. A, G, C, or U). In some embodiments, nucleotides and nucleosides of the present disclosure comprise standard deoxyribonucleosides such as those present in DNA (e.g. dA, dG, dC, or dT).

### Chemical Modifications

[0108] The compositions of the present disclosure comprise, in some embodiments, an RNA having an open reading frame encoding a coronavirus antigen, wherein the nucleic acid comprises nucleotides and/or nucleosides that can be standard (unmodified) or modified as is known in the art. In some embodiments, nucleotides and nucleosides of the present disclosure comprise modified nucleotides or nucleosides. Such modified nucleotides and nucleosides can be naturally-occurring modified nucleotides and nucleosides or non-naturally occurring modified nucleotides and nucleosides. Such modifications can include those at the sugar, backbone, or nucleobase portion of the nucleotide and/or nucleoside as are recognized in the art.

[0109] In some embodiments, a naturally-occurring modified nucleotide or nucleotide of the disclosure is one as is generally known or recognized in the art. Non-limiting examples of such naturally occurring modified nucleotides and nucleotides can be found, inter alia, in the widely recognized MODOMICS database.

[0110] In some embodiments, a non-naturally occurring modified nucleotide or nucleoside of the disclosure is one as is generally known or recognized in the art. Non-limiting examples of such non-naturally occurring modified nucleotides and nucleosides can be found, inter alia, in published US application Nos. PCT/US2012/058519; PCT/US2013/075177; PCT/US2014/058897; PCT/US2014/058891; PCT/US2014/070413; PCT/US2015/36773; PCT/US2015/36759; PCT/US2015/36771; or PCT/IB2017/051367 all of which are incorporated by reference herein.

[0111] Hence, nucleic acids of the disclosure (e.g., DNA nucleic acids and RNA nucleic acids, such as mRNA nucleic acids) can comprise standard nucleotides and nucleosides, naturally-occurring nucleotides and nucleosides, non-naturally-occurring nucleotides and nucleosides, or any combination thereof.

[0112] Nucleic acids of the disclosure (e.g., DNA nucleic acids and RNA nucleic acids, such as mRNA nucleic acids), in some embodiments, comprise various (more than one) different types of standard and/or modified nucleotides and nucleosides. In some embodiments, a particular region of a nucleic acid contains one, two or more (optionally different) types of standard and/or modified nucleotides and nucleosides.

[0113] In some embodiments, a modified RNA nucleic acid (e.g., a modified mRNA nucleic acid), introduced to a cell or organism, exhibits reduced degradation in the cell or organism, respectively, relative to an unmodified nucleic acid comprising standard nucleotides and nucleosides.

[0114] In some embodiments, a modified RNA nucleic acid (e.g., a modified mRNA nucleic acid), introduced into a cell or organism, may exhibit reduced immunogenicity in the cell or organism, respectively (e.g., a reduced innate response) relative to an unmodified nucleic acid comprising standard nucleotides and nucleosides.

[0115] Nucleic acids (e.g., RNA nucleic acids, such as mRNA nucleic acids), in some embodiments, comprise non-natural modified nucleotides that are introduced during synthesis or post-synthesis of the nucleic acids to achieve desired functions or properties. The modifications may be present on internucleotide linkages, purine or pyrimidine bases, or sugars. The modification may be introduced with chemical synthesis or with a polymerase enzyme at the terminal of a chain or anywhere else in the chain. Any of the regions of a nucleic acid may be chemically modified.

[0116] The present disclosure provides for modified nucleosides and nucleotides of a nucleic acid (e.g., RNA nucleic acids, such as mRNA nucleic acids). A “nucleoside” refers to a compound containing a sugar molecule (e.g., a pentose or ribose) or a derivative thereof in combination with an organic base (e.g., a purine or pyrimidine) or a derivative thereof (also referred to herein as “nucleobase”). A “nucleotide” refers to a nucleoside, including a phosphate group. Modified nucleotides may by synthesized by any useful method, such as, for example, chemically, enzymatically, or recombinantly, to include one or more modified or non-natural nucleosides. Nucleic acids can comprise a region or regions of linked nucleosides. Such regions may have variable backbone linkages. The linkages can be standard phosphodiester linkages, in which case the nucleic acids would comprise regions of nucleotides.

[0117] Modified nucleotide base pairing encompasses not only the standard adenosine-thymine, adenosine-uracil, or guanosine-cytosine base pairs, but also base pairs formed between nucleotides and/or modified nucleotides comprising non-standard or modified bases, wherein the arrangement of hydrogen bond donors and hydrogen bond acceptors permits hydrogen bonding between a non-standard base and a standard base or between two complementary non-standard base structures, such as, for example, in those nucleic acids having at least one chemical modification. One example of such non-standard base pairing is the base pairing between the modified nucleotide inosine and adenine, cytosine or uracil. Any combination of base/sugar or linker may be incorporated into nucleic acids of the present disclosure.

[0118] In some embodiments, modified nucleobases in nucleic acids (e.g., RNA nucleic acids, such as mRNA nucleic acids) comprise 1-methyl-pseudouridine (ml ψ), 1-ethyl-pseudouridine (e1ψ), 5-methoxy-uridine (mo5U), 5-methyl-cytidine (m5C), and/or pseudouridine (ψ). In some embodiments, modified nucleobases in nucleic acids (e.g., RNA nucleic acids, such as mRNA nucleic acids) comprise 5-methoxymethyl uridine, 5-methylthio uridine, 1-methoxymethyl pseudouridine, 5-methyl cytidine, and/or 5-methoxy cytidine. In some embodiments, the polyribonucleotide includes a combination of at least two (e.g., 2, 3, 4 or more) of any of the aforementioned modified nucleobases, including but not limited to chemical modifications.

[0119] In some embodiments, a mRNA of the disclosure comprises 1-methyl-pseudouridine (ml ψ) substitutions at one or more or all uridine positions of the nucleic acid.

[0120] In some embodiments, a mRNA of the disclosure comprises 1-methyl-pseudouridine (ml ψ) substitutions at one or more or all uridine positions of the nucleic acid and 5-methyl cytidine substitutions at one or more or all cytidine positions of the nucleic acid.

[0121] In some embodiments, a mRNA of the disclosure comprises pseudouridine (w) substitutions at one or more or all uridine positions of the nucleic acid.

[0122] In some embodiments, a mRNA of the disclosure comprises pseudouridine (w) substitutions at one or more or all uridine positions of the nucleic acid and 5-methyl cytidine substitutions at one or more or all cytidine positions of the nucleic acid.

[0123] In some embodiments, a mRNA of the disclosure comprises uridine at one or more or all uridine positions of the nucleic acid.

[0124] In some embodiments, mRNAs are uniformly modified (e.g., fully modified, modified throughout the entire sequence) for a particular modification. For example, a nucleic acid can be uniformly modified with 1-methyl-pseudouridine, meaning that all uridine residues in the mRNA sequence are replaced with 1-methyl-pseudouridine. Similarly, a nucleic acid can be uniformly modified for any type of nucleoside residue present in the sequence by replacement with a modified residue such as those set forth above.

[0125] The nucleic acids of the present disclosure may be partially or fully modified along the entire length of the molecule. For example, one or more or all or a given type of nucleotide (e.g., purine or pyrimidine, or any one or more or all of A, G, U, C) may be uniformly modified in a nucleic acid of the disclosure, or in a predetermined sequence region thereof (e.g., in the mRNA including or excluding the poly(A) tail). In some embodiments, all nucleotides X in a nucleic acid of the present disclosure (or in a sequence region thereof) are modified nucleotides, wherein X may be any one of nucleotides A, G, U, C, or any one of the combinations A+G, A+U, A+C, G+U, G+C, U+C, A+G+U, A+G+C, G+U+C or A+G+C.

[0126] The nucleic acid may contain from about 1% to about 100% modified nucleotides (either in relation to overall nucleotide content, or in relation to one or more types of nucleotide, i.e., any one or more of A, G, U or C) or any intervening percentage (e.g., from 1% to 20%, from 1% to 25%, from 1% to 50%, from 1% to 60%, from 1% to 70%, from 1% to 80%, from 1% to 90%, from 1% to 95%, from 10% to 20%, from 10% to 25%, from 10% to 50%, from 10% to 60%, from 10% to 70%, from 10% to 80%, from 10% to 90%, from 10% to 95%, from 10% to 100%, from 20% to 25%, from 20% to 50%, from 20% to 60%, from 20% to 70%, from 20% to 80%, from 20% to 90%, from 20% to 95%, from 20% to 100%, from 50% to 60%, from 50% to 70%, from 50% to 80%, from 50% to 90%, from 50% to 95%, from 50% to 100%, from 70% to 80%, from 70% to 90%, from 70% to 95%, from 70% to 100%, from 80% to 90%, from 80% to 95%, from 80% to 100%, from 90% to 95%, from 90% to 100%, and from 95% to 100%). It will be understood that any remaining percentage is accounted for by the presence of unmodified A, G, U, or C.

[0127] The mRNAs may contain at a minimum 1% and at maximum 100% modified nucleotides, or any intervening percentage, such as at least 5% modified nucleotides, at least 10% modified nucleotides, at least 25% modified nucleotides, at least 50% modified nucleotides, at least 80% modified nucleotides, or at least 90% modified nucleotides. For example, the nucleic acids may contain a modified pyrimidine such as a modified uracil or cytosine. In some embodiments, at least 5%, at least 10%, at least 25%, at least 50%, at least 80%, at least 90% or 100% of the uracil in the nucleic acid is replaced with a modified uracil (e.g., a 5-substituted uracil). The modified uracil can be replaced by a compound having a single unique structure, or can be replaced by a plurality of compounds having different structures (e.g., 2, 3, 4 or more unique structures). In some embodiments, at least 5%, at least 10%, at least 25%, at least 50%, at least 80%, at least 90% or 100% of the cytosine in the nucleic acid is replaced with a modified cytosine (e.g., a 5-substituted cytosine). The modified cytosine can be replaced by a compound having a single unique structure, or can be replaced by a plurality of compounds having different structures (e.g., 2, 3, 4 or more unique structures).

### Untranslated Regions (UTRs)

[0128] The mRNAs of the present disclosure may comprise one or more regions or parts which act or function as an untranslated region. Where mRNAs are designed to encode at least one antigen of interest, the nucleic may comprise one or more of these untranslated regions (UTRs). Wild-type untranslated regions of a nucleic acid are transcribed but not translated. In mRNA, the 5′ UTR starts at the transcription start site and continues to the start codon but does not include the start codon; whereas, the 3′ UTR starts immediately following the stop codon and continues until the transcriptional termination signal. There is growing body of evidence about the regulatory roles played by the UTRs in terms of stability of the nucleic acid molecule and translation. The regulatory features of a UTR can be incorporated into the polynucleotides of the present disclosure to, among other things, enhance the stability of the molecule. The specific features can also be incorporated to ensure controlled down-regulation of the transcript in case they are misdirected to undesired organs sites. A variety of 5′ UTR and 3′ UTR sequences are known and available in the art.

[0129] A 5′ UTR is region of an mRNA that is directly upstream (5′) from the start codon (the first codon of an mRNA transcript translated by a ribosome). A 5′ UTR does not encode a protein (is non-coding). Natural 5′ UTRs have features that play roles in translation initiation. They harbor signatures like Kozak sequences which are commonly known to be involved in the process by which the ribosome initiates translation of many genes. Kozak sequences have the consensus CCR(A/G)CCAUGG (SEQ ID NO: 44), where R is a purine (adenine or guanine) three bases upstream of the start codon (AUG), which is followed by another ‘G’. 5′ UTR also have been known to form secondary structures which are involved in elongation factor binding.

[0130] In some embodiments of the disclosure, a 5′ UTR is a heterologous UTR, i.e., is a UTR found in nature associated with a different ORF. In another embodiment, a 5′ UTR is a synthetic UTR, i.e., does not occur in nature. Synthetic UTRs include UTRs that have been mutated to improve their properties, e.g., which increase gene expression as well as those which are completely synthetic. Exemplary 5′ UTRs include Xenopus or human derived α-globin or b-globin (U.S. Pat. Nos. 8,278,063; 9,012,219), human cytochrome b-245 a polypeptide, and hydroxysteroid (17b) dehydrogenase, and Tobacco etch virus (U.S. Pat. Nos. 8,278,063, 9,012,219). CMV immediate-early 1 (IE1) gene (US2014/0206753, WO2013/185069), the sequence GGGAUCCUACC (SEQ ID NO: 45) (WO2014/144196) may also be used. In another embodiment, 5′ UTR of a TOP gene is a 5′ UTR of a TOP gene lacking the 5′ TOP motif (the oligopyrimidine tract) (e.g., WO/2015/101414, WO2015/101415, WO/2015/062738, WO2015/024667, WO2015/024667; 5′ UTR element derived from ribosomal protein Large 32 (L32) gene (WO/2015/101414, WO2015/101415, WO/2015/062738), 5′ UTR element derived from the 5′ UTR of an hydroxysteroid (1743) dehydrogenase 4 gene (HSD17B4) (WO2015/024667), or a 5′ UTR element derived from the 5′ UTR of ATP5A1 (WO2015/024667) can be used. In some embodiments, an internal ribosome entry site (IRES) is used instead of a 5′ UTR.

[0131] In some embodiments, a 5′ UTR of the present disclosure comprises a sequence selected from SEQ ID NO: 2 and SEQ ID NO: 36.

[0132] A 3′ UTR is region of an mRNA that is directly downstream (3′) from the stop codon (the codon of an mRNA transcript that signals a termination of translation). A 3′ UTR does not encode a protein (is non-coding). Natural or wild type 3′ UTRs are known to have stretches of adenosines and uridines embedded in them. These AU rich signatures are particularly prevalent in genes with high rates of turnover. Based on their sequence features and functional properties, the AU rich elements (AREs) can be separated into three classes (Chen et al, 1995): Class I AREs contain several dispersed copies of an AUUUA motif within U-rich regions. C-Myc and MyoD contain class I AREs. Class II AREs possess two or more overlapping UUAUUUA(U/A)(U/A) (SEQ ID NO: 46) nonamers. Molecules containing this type of AREs include GM-CSF and TNF-α. Class III ARES are less well defined. These U rich regions do not contain an AUUUA motif. c-Jun and Myogenin are two well-studied examples of this class. Most proteins binding to the AREs are known to destabilize the messenger, whereas members of the ELAV family, most notably HuR, have been documented to increase the stability of mRNA. HuR binds to AREs of all the three classes. Engineering the HuR specific binding sites into the 3′ UTR of nucleic acid molecules will lead to HuR binding and thus, stabilization of the message in vivo.

[0133] Introduction, removal or modification of 3′ UTR AU rich elements (AREs) can be used to modulate the stability of nucleic acids (e.g., RNA) of the disclosure. When engineering specific nucleic acids, one or more copies of an ARE can be introduced to make nucleic acids of the disclosure less stable and thereby curtail translation and decrease production of the resultant protein. Likewise, AREs can be identified and removed or mutated to increase the intracellular stability and thus increase translation and production of the resultant protein. Transfection experiments can be conducted in relevant cell lines, using nucleic acids of the disclosure and protein production can be assayed at various time points post-transfection. For example, cells can be transfected with different ARE-engineering molecules and by using an ELISA kit to the relevant protein and assaying protein produced at 6 hour, 12 hour, 24 hour, 48 hour, and 7 days post-transfection. 3′ UTRs may be heterologous or synthetic. With respect to 3′ UTRs, globin UTRs, including Xenopus β-globin UTRs and human β-globin UTRs are known in the art (U.S. Pat. Nos. 8,278,063, 9,012,219, US2011/0086907). A modified β-globin construct with enhanced stability in some cell types by cloning two sequential human β-globin 3′UTRs head to tail has been developed and is well known in the art (US2012/0195936, WO2014/071963). In addition a2-globin, a1-globin, UTRs and mutants thereof are also known in the art (WO2015/101415, WO2015/024667). Other 3′ UTRs described in the mRNA constructs in the non-patent literature include CYBA (Ferizi et al., 2015) and albumin (Thess et al., 2015). Other exemplary 3′ UTRs include that of bovine or human growth hormone (wild type or modified) (WO2013/185069, US2014/0206753, WO2014152774), rabbit f3 globin and hepatitis B virus (HBV), α-globin 3′ UTR and Viral VEEV 3′ UTR sequences are also known in the art. In some embodiments, the sequence UUUGAAUU (WO2014/144196) is used. In some embodiments, 3′ UTRs of human and mouse ribosomal protein are used. Other examples include rps9 3′UTR (WO2015/101414), FIG. 4 (WO2015/101415), and human albumin 7 (WO2015/101415).

[0134] In some embodiments, a 3′ UTR of the present disclosure comprises a sequence selected from SEQ ID NO: 4 and SEQ NO: 37.

[0135] Those of ordinary skill in the art will understand that 5′ UTRs that are heterologous or synthetic may be used with any desired 3′ UTR sequence. For example, a heterologous 5′ UTR may be used with a synthetic 3′ UTR with a heterologous 3′ UTR.

[0136] Non-UTR sequences may also be used as regions or subregions within a nucleic acid. For example, introns or portions of introns sequences may be incorporated into regions of nucleic acid of the disclosure. Incorporation of intronic sequences may increase protein production as well as nucleic acid levels.

[0137] Combinations of features may be included in flanking regions and may be contained within other features. For example, the ORF may be flanked by a 5′ UTR which may contain a strong Kozak translational initiation signal and/or a 3′ UTR which may include an oligo(dT) sequence for templated addition of a poly-A tail. 5′ UTR may comprise a first polynucleotide fragment and a second polynucleotide fragment from the same and/or different genes such as the 5′ UTRs described in US Patent Application Publication No. 2010/0293625 and PCT/US2014/069155, herein incorporated by reference in its entirety.

[0138] It should be understood that any UTR from any gene may be incorporated into the regions of a nucleic acid. Furthermore, multiple wild-type UTRs of any known gene may be utilized. It is also within the scope of the present disclosure to provide artificial UTRs which are not variants of wild type regions. These UTRs or portions thereof may be placed in the same orientation as in the transcript from which they were selected or may be altered in orientation or location. Hence a 5′ or 3′ UTR may be inverted, shortened, lengthened, made with one or more other 5′ UTRs or 3′ UTRs. As used herein, the term “altered” as it relates to a UTR sequence, means that the UTR has been changed in some way in relation to a reference sequence. For example, a 3′ UTR or 5′ UTR may be altered relative to a wild-type or native UTR by the change in orientation or location as taught above or may be altered by the inclusion of additional nucleotides, deletion of nucleotides, swapping or transposition of nucleotides. Any of these changes producing an “altered” UTR (whether 3′ or 5′) comprise a variant UTR.

[0139] In some embodiments, a double, triple or quadruple UTR such as a 5′ UTR or 3′ UTR may be used. As used herein, a “double” UTR is one in which two copies of the same UTR are encoded either in series or substantially in series. For example, a double beta-globin 3′ UTR may be used as described in US Patent publication 2010/0129877, the contents of which are incorporated herein by reference in its entirety.

[0140] It is also within the scope of the present disclosure to have patterned UTRs. As used herein “patterned UTRs” are those UTRs which reflect a repeating or alternating pattern, such as ABABAB or AABBAABBAABB or ABCABCABC or variants thereof repeated once, twice, or more than 3 times. In these patterns, each letter, A, B, or C represent a different UTR at the nucleotide level.

[0141] In some embodiments, flanking regions are selected from a family of transcripts whose proteins share a common function, structure, feature or property. For example, polypeptides of interest may belong to a family of proteins which are expressed in a particular cell, tissue or at some time during development. The UTRs from any of these genes may be swapped for any other UTR of the same or different family of proteins to create a new polynucleotide. As used herein, a “family of proteins” is used in the broadest sense to refer to a group of two or more polypeptides of interest which share at least one function, structure, feature, localization, origin, or expression pattern.

[0142] The untranslated region may also include translation enhancer elements (TEE). As a non-limiting example, the TEE may include those described in US Application No. 2009/0226470, herein incorporated by reference in its entirety, and those known in the art.

In vitro Transcription of RNA

[0143] cDNA encoding the polynucleotides described herein may be transcribed using an in vitro transcription (IVT) system. In vitro transcription of RNA is known in the art and is described in International Publication WO 2014/152027, which is incorporated by reference herein in its entirety. In some embodiments, the RNA of the present disclosure is prepared in accordance with any one or more of the methods described in WO 2018/053209 and WO 2019/036682, each of which is incorporated by reference herein.

[0144] In some embodiments, the RNA transcript is generated using a non-amplified, linearized DNA template in an in vitro transcription reaction to generate the RNA transcript. In some embodiments, the template DNA is isolated DNA. In some embodiments, the template DNA is cDNA. In some embodiments, the cDNA is formed by reverse transcription of a RNA polynucleotide, for example, but not limited to coronavirus mRNA. In some embodiments, cells, e.g., bacterial cells, e.g., E. coli, e.g., DH-1 cells are transfected with the plasmid DNA template. In some embodiments, the transfected cells are cultured to replicate the plasmid DNA which is then isolated and purified. In some embodiments, the DNA template includes a RNA polymerase promoter, e.g., a T7 promoter located 5′ to and operably linked to the gene of interest.

[0145] In some embodiments, an in vitro transcription template encodes a 5′ untranslated (UTR) region, contains an open reading frame, and encodes a 3′ UTR and a poly(A) tail. The particular nucleic acid sequence composition and length of an in vitro transcription template will depend on the mRNA encoded by the template.

[0146] A “5′ untranslated region” (UTR) refers to a region of an mRNA that is directly upstream (i.e., 5′) from the start codon (i.e., the first codon of an mRNA transcript translated by a ribosome) that does not encode a polypeptide. When RNA transcripts are being generated, the 5′ UTR may comprise a promoter sequence. Such promoter sequences are known in the art. It should be understood that such promoter sequences will not be present in a vaccine of the disclosure.

[0147] A “3′ untranslated region” (UTR) refers to a region of an mRNA that is directly downstream (i.e., 3′) from the stop codon (i.e., the codon of an mRNA transcript that signals a termination of translation) that does not encode a polypeptide.

[0148] An “open reading frame” is a continuous stretch of DNA beginning with a start codon (e.g., methionine (ATG)), and ending with a stop codon (e.g., TAA, TAG or TGA) and encodes a polypeptide.

[0149] A “poly(A) tail” is a region of mRNA that is downstream, e.g., directly downstream (i.e., 3′), from the 3′ UTR that contains multiple, consecutive adenosine monophosphates. A poly(A) tail may contain 10 to 300 adenosine monophosphates. For example, a poly(A) tail may contain 10, 20, 30, 40, 50, 60, 70, 80, 90, 100, 110, 120, 130, 140, 150, 160, 170, 180, 190, 200, 210, 220, 230, 240, 250, 260, 270, 280, 290 or 300 adenosine monophosphates. In some embodiments, a poly(A) tail contains 50 to 250 adenosine monophosphates. In a relevant biological setting (e.g., in cells, in vivo) the poly(A) tail functions to protect mRNA from enzymatic degradation, e.g., in the cytoplasm, and aids in transcription termination, and/or export of the mRNA from the nucleus and translation.

[0150] In some embodiments, a nucleic acid includes 200 to 3,000 nucleotides. For example, a nucleic acid may include 200 to 500, 200 to 1000, 200 to 1500, 200 to 3000, 500 to 1000, 500 to 1500, 500 to 2000, 500 to 3000, 1000 to 1500, 1000 to 2000, 1000 to 3000, 1500 to 3000, or 2000 to 3000 nucleotides).

[0151] An in vitro transcription system typically comprises a transcription buffer, nucleotide triphosphates (NTPs), an RNase inhibitor and a polymerase.

[0152] The NTPs may be manufactured in house, may be selected from a supplier, or may be synthesized as described herein. The NTPs may be selected from, but are not limited to, those described herein including natural and unnatural (modified) NTPs.

[0153] Any number of RNA polymerases or variants may be used in the method of the present disclosure. The polymerase may be selected from, but is not limited to, a phage RNA polymerase, e.g., a T7 RNA polymerase, a T3 RNA polymerase, a SP6 RNA polymerase, and/or mutant polymerases such as, but not limited to, polymerases able to incorporate modified nucleic acids and/or modified nucleotides, including chemically modified nucleic acids and/or nucleotides. Some embodiments exclude the use of DNase.

[0154] In some embodiments, the RNA transcript is capped via enzymatic capping. In some embodiments, the RNA comprises 5′ terminal cap, for example, 7mG(5′)ppp(5′)NlmpNp.

### Chemical Synthesis

[0155] Solid-phase chemical synthesis. Nucleic acids the present disclosure may be manufactured in whole or in part using solid phase techniques. Solid-phase chemical synthesis of nucleic acids is an automated method wherein molecules are immobilized on a solid support and synthesized step by step in a reactant solution. Solid-phase synthesis is useful in site-specific introduction of chemical modifications in the nucleic acid sequences.

[0156] Liquid Phase Chemical Synthesis. The synthesis of nucleic acids of the present disclosure by the sequential addition of monomer building blocks may be carried out in a liquid phase.

[0157] Combination of Synthetic Methods. The synthetic methods discussed above each has its own advantages and limitations. Attempts have been conducted to combine these methods to overcome the limitations. Such combinations of methods are within the scope of the present disclosure. The use of solid-phase or liquid-phase chemical synthesis in combination with enzymatic ligation provides an efficient way to generate long chain nucleic acids that cannot be obtained by chemical synthesis alone.

### Ligation of Nucleic Acid Regions or Subregions

[0158] Assembling nucleic acids by a ligase may also be used. DNA or RNA ligases promote intermolecular ligation of the 5′ and 3′ ends of polynucleotide chains through the formation of a phosphodiester bond. Nucleic acids such as chimeric polynucleotides and/or circular nucleic acids may be prepared by ligation of one or more regions or subregions. DNA fragments can be joined by a ligase catalyzed reaction to create recombinant DNA with different functions. Two oligodeoxynucleotides, one with a 5′ phosphoryl group and another with a free 3′ hydroxyl group, serve as substrates for a DNA ligase.

### Purification

[0159] Purification of the nucleic acids described herein may include, but is not limited to, nucleic acid clean-up, quality assurance and quality control. Clean-up may be performed by methods known in the arts such as, but not limited to, AGENCOURT® beads (Beckman Coulter Genomics, Danvers, Mass.), poly-T beads, LNA™ oligo-T capture probes (EXIQON® Inc, Vedbaek, Denmark) or HPLC based purification methods such as, but not limited to, strong anion exchange HPLC, weak anion exchange HPLC, reverse phase HPLC (RP-HPLC), and hydrophobic interaction HPLC (HIC-HPLC). The term “purified” when used in relation to a nucleic acid such as a “purified nucleic acid” refers to one that is separated from at least one contaminant. A “contaminant” is any substance that makes another unfit, impure or inferior. Thus, a purified nucleic acid (e.g., DNA and RNA) is present in a form or setting different from that in which it is found in nature, or a form or setting different from that which existed prior to subjecting it to a treatment or purification method.

[0160] A quality assurance and/or quality control check may be conducted using methods such as, but not limited to, gel electrophoresis, UV absorbance, or analytical HPLC.

[0161] In some embodiments, the nucleic acids may be sequenced by methods including, but not limited to reverse-transcriptase-PCR.

### Quantification

[0162] In some embodiments, the nucleic acids of the present disclosure may be quantified in exosomes or when derived from one or more bodily fluid. Bodily fluids include peripheral blood, serum, plasma, ascites, urine, cerebrospinal fluid (CSF), sputum, saliva, bone marrow, synovial fluid, aqueous humor, amniotic fluid, cerumen, breast milk, broncheoalveolar lavage fluid, semen, prostatic fluid, cowper's fluid or pre-ejaculatory fluid, sweat, fecal matter, hair, tears, cyst fluid, pleural and peritoneal fluid, pericardial fluid, lymph, chyme, chyle, bile, interstitial fluid, menses, pus, sebum, vomit, vaginal secretions, mucosal secretion, stool water, pancreatic juice, lavage fluids from sinus cavities, bronchopulmonary aspirates, blastocyl cavity fluid, and umbilical cord blood. Alternatively, exosomes may be retrieved from an organ selected from the group consisting of lung, heart, pancreas, stomach, intestine, bladder, kidney, ovary, testis, skin, colon, breast, prostate, brain, esophagus, liver, and placenta.

[0163] Assays may be performed using construct specific probes, cytometry, qRT-PCR, real-time PCR, PCR, flow cytometry, electrophoresis, mass spectrometry, or combinations thereof while the exosomes may be isolated using immunohistochemical methods such as enzyme linked immunosorbent assay (ELISA) methods. Exosomes may also be isolated by size exclusion chromatography, density gradient centrifugation, differential centrifugation, nanomembrane ultrafiltration, immunoabsorbent capture, affinity purification, microfluidic separation, or combinations thereof.

[0164] These methods afford the investigator the ability to monitor, in real time, the level of nucleic acids remaining or delivered. This is possible because the nucleic acids of the present disclosure, in some embodiments, differ from the endogenous forms due to the structural or chemical modifications.

[0165] In some embodiments, the nucleic acid may be quantified using methods such as, but not limited to, ultraviolet visible spectroscopy (UV/Vis). A non-limiting example of a UV/Vis spectrometer is a NANODROP® spectrometer (ThermoFisher, Waltham, Mass.). The quantified nucleic acid may be analyzed in order to determine if the nucleic acid may be of proper size, check that no degradation of the nucleic acid has occurred. Degradation of the nucleic acid may be checked by methods such as, but not limited to, agarose gel electrophoresis, HPLC based purification methods such as, but not limited to, strong anion exchange HPLC, weak anion exchange HPLC, reverse phase HPLC (RP-HPLC), and hydrophobic interaction HPLC (HIC-HPLC), liquid chromatography-mass spectrometry (LCMS), capillary electrophoresis (CE) and capillary gel electrophoresis (CGE).

### Lipid Nanoparticles (LNPs)

[0166] In some embodiments, the RNA (e.g., mRNA) of the disclosure is formulated in a lipid nanoparticle (LNP). Lipid nanoparticles typically comprise ionizable cationic lipid, non-cationic lipid, sterol and PEG lipid components along with the nucleic acid cargo of interest. The lipid nanoparticles of the disclosure can be generated using components, compositions, and methods as are generally known in the art, see for example PCT/US2016/052352; PCT/US2016/068300; PCT/US2017/037551; PCT/US2015/027400; PCT/US2016/047406; PCT/US2016000129; PCT/US2016/014280; PCT/US2016/014280; PCT/US2017/038426; PCT/US2014/027077; PCT/US2014/055394; PCT/US2016/52117; PCT/US2012/069610; PCT/US2017/027492; PCT/US2016/059575 and PCT/US2016/069491 all of which are incorporated by reference herein in their entirety.

[0167] Vaccines of the present disclosure are typically formulated in lipid nanoparticle. In some embodiments, the lipid nanoparticle comprises at least one ionizable cationic lipid, at least one non-cationic lipid, at least one sterol, and/or at least one polyethylene glycol (PEG)-modified lipid.

[0168] In some embodiments, the lipid nanoparticle comprises 20-60 mol % ionizable cationic lipid. For example, the lipid nanoparticle may comprise 20-50 mol %, 20-40 mol %, 20-30 mol %, 30-60 mol %, 30-50 mol %, 30-40 mol %, 40-60 mol %, 40-50 mol %, or 50-60 mol % ionizable cationic lipid. In some embodiments, the lipid nanoparticle comprises 20 mol %, 30 mol %, 40 mol %, 50 mol %, or 60 mol % ionizable cationic lipid.

[0169] In some embodiments, the lipid nanoparticle comprises 5-25 mol % non-cationic lipid. For example, the lipid nanoparticle may comprise 5-20 mol %, 5-15 mol %, 5-10 mol %, 10-25 mol %, 10-20 mol %, 10-25 mol %, 15-25 mol %, 15-20 mol %, or 20-25 mol % non-cationic lipid. In some embodiments, the lipid nanoparticle comprises 5 mol %, 10 mol %, 15 mol %, 20 mol %, or 25 mol % non-cationic lipid.

[0170] In some embodiments, the lipid nanoparticle comprises 25-55 mol % sterol. For example, the lipid nanoparticle may comprise 25-50 mol %, 25-45 mol %, 25-40 mol %, 25-35 mol %, 25-30 mol %, 30-55 mol %, 30-50 mol %, 30-45 mol %, 30-40 mol %, 30-35 mol %, 35-55 mol %, 35-50 mol %, 35-45 mol %, 35-40 mol %, 40-55 mol %, 40-50 mol %, 40-45 mol %, 45-55 mol %, 45-50 mol %, or 50-55 mol % sterol. In some embodiments, the lipid nanoparticle comprises 25 mol %, 30 mol %, 35 mol %, 40 mol %, 45 mol %, 50 mol %, or 55 mol % sterol.

[0171] In some embodiments, the lipid nanoparticle comprises 0.5-15 mol % PEG-modified lipid. For example, the lipid nanoparticle may comprise 0.5-10 mol %, 0.5-5 mol %, 1-15 mol %, 1-10 mol %, 1-5 mol %, 2-15 mol %, 2-10 mol %, 2-5 mol %, 5-15 mol %, 5-10 mol %, or 10-15 mol %. In some embodiments, the lipid nanoparticle comprises 0.5 mol %, 1 mol %, 2 mol %, 3 mol %, 4 mol %, 5 mol %, 6 mol %, 7 mol %, 8 mol %, 9 mol %, 10 mol %, 11 mol %, 12 mol %, 13 mol %, 14 mol %, or 15 mol % PEG-modified lipid.

[0172] In some embodiments, the lipid nanoparticle comprises 20-60 mol % ionizable cationic lipid, 5-25 mol % non-cationic lipid, 25-55 mol % sterol, and 0.5-15 mol % PEG-modified lipid.

[0173] In some embodiments, an ionizable cationic lipid of the disclosure comprises a compound of Formula (I):

[chemical structure]

[0174] or a salt or isomer thereof, wherein:

[0175] R₁ is selected from the group consisting of C₅₋₃₀ alkyl, C₅₋₂₀ alkenyl, —R*YR″, —YR″, and —R″M′R′;

[0176] R₂ and R₃ are independently selected from the group consisting of H, C₁₋₁₄ alkyl, C₂₋₁₄ alkenyl, —R*YR″, —YR″, and —R*OR″, or R₂ and R₃, together with the atom to which they are attached, form a heterocycle or carbocycle;

[0177] R₄ is selected from the group consisting of a C₃₋₆ carbocycle, —(CH₂)ₙQ, —(CH₂)ₙCHQR, —CHQR, —CQ(R)₂, and unsubstituted C₁₋₆ alkyl, where Q is selected from a carbocycle, heterocycle, —OR, —O(CH₂)ₙN(R)₂, —C(O)OR, —OC(O)R, —CX₃, —CX₂H, —CXH₂, —CN, —N(R)₂, —C(O)N(R)₂, —N(R)C(O)R, —N(R)S(O)₂R, —N(R)C(O)N(R)₂, —N(R)C(S)N(R)₂, —N(R)R₈, —O(CH₂)ₙOR, —N(R)C(═NR₉)N(R)₂, —N(R)C(═CHR₉)N(R)₂, —OC(O)N(R)₂, —N(R)C(O)OR, —N(OR)C(O)R, —N(OR)S(O)₂R, —N(OR)C(O)OR, —N(OR)C(O)N(R)₂, —N(OR)C(S)N(R)₂, —N(OR)C(═NR₉)N(R)₂, —N(OR)C(═CHR₉)N(R)₂, —C(═NR₉)N(R)₂, —C(═NR₉)R, —C(O)N(R)OR, and —C(R)N(R)₂C(O)OR, and each n is independently selected from 1, 2, 3, 4, and 5;

[0178] each R₅ is independently selected from the group consisting of C₁₋₃ alkyl, C₂₋₃ alkenyl, and H;

[0179] each R₆ is independently selected from the group consisting of C₁₋₃ alkyl, C₂₋₃ alkenyl, and H;

[0180] M and M′ are independently selected from —C(O)O—, —OC(O)—, —C(O)N(R′)—, —N(R′)C(O)—, —C(O)—, —C(S)—, —C(S)S—, —SC(S)—, —CH(OH)—, —P(O)(OR′)O—, —S(O)₂—, —S—S—, an aryl group, and a heteroaryl group;

[0181] R₇ is selected from the group consisting of C₁₋₃ alkyl, C₂₋₃ alkenyl, and H;

[0182] R₈ is selected from the group consisting of C₃₋₆ carbocycle and heterocycle;

[0183] R₉ is selected from the group consisting of H, CN, NO₂, C₁₋₆ alkyl, —OR, —S(O)₂R, —S(O)₂N(R)₂, C₂₋₆ alkenyl, C₃₋₆ carbocycle and heterocycle;

[0184] each R is independently selected from the group consisting of C₁₋₃ alkyl, C₂₋₃ alkenyl, and H;

[0185] each R′ is independently selected from the group consisting of C₁₋₁₈ alkyl, C₂₋₁₈ alkenyl, —R*YR″, —YR″, and H;

[0186] each R″ is independently selected from the group consisting of C₃₋₁₄ alkyl and C₃₋₁₄ alkenyl;

[0187] each R* is independently selected from the group consisting of C₁₋₁₂ alkyl and C₂₋₁₂ alkenyl;

[0188] each Y is independently a C₃₋₆ carbocycle;

[0189] each X is independently selected from the group consisting of F, Cl, Br, and I; and

[0190] m is selected from 5, 6, 7, 8, 9, 10, 11, 12, and 13.

[0191] In some embodiments, a subset of compounds of Formula (I) includes those in which when R₄ is —(CH₂)ₙQ, —(CH₂)ₙCHQR, —CHQR, or —CQ(R)₂, then (i) Q is not —N(R)₂ when n is 1, 2, 3, 4 or 5, or (ii) Q is not 5, 6, or 7-membered heterocycloalkyl when n is 1 or 2.

[0192] In some embodiments, another subset of compounds of Formula (I) includes those in which

[0193] R₁ is selected from the group consisting of C₅₋₃₀ alkyl, C₅₋₂₀ alkenyl, —R*YR″, —YR″, and —R″M′R′;

[0194] R₂ and R₃ are independently selected from the group consisting of H, C₁₋₁₄ alkyl, C₂₋₁₄ alkenyl, —R*YR″, —YR″, and —R*OR″, or R₂ and R₃, together with the atom to which they are attached, form a heterocycle or carbocycle;

[0195] R₄ is selected from the group consisting of a C₃₋₆ carbocycle, —(CH₂)ₙQ, —(CH₂)ₙCHQR, —CHQR, —CQ(R)₂, and unsubstituted C₁₋₆ alkyl, where Q is selected from a C₃₋₆ carbocycle, a 5- to 14-membered heteroaryl having one or more heteroatoms selected from N, O, and S, —OR, —O(CH₂)ₙN(R)₂, —C(O)OR, —OC(O)R, —CX₃, —CX₂H, —CXH₂, —CN, —C(O)N(R)₂, —N(R)C(O)R, —N(R)S(O)₂R, —N(R)C(O)N(R)₂, —N(R)C(S)N(R)₂, —CRN(R)₂C(O)OR, —N(R)R₈, —O(CH₂)ₙOR, —N(R)C(═NR₉)N(R)₂, —N(R)C(═CHR₉)N(R)₂, —OC(O)N(R)₂, —N(R)C(O)OR, —N(OR)C(O)R, —N(OR)S(O)₂R, —N(OR)C(O)OR, —N(OR)C(O)N(R)₂, —N(OR)C(S)N(R)₂, —N(OR)C(═NR₉)N(R)₂, —N(OR)C(═CHR₉)N(R)₂, —C(═NR₉)N(R)₂, —C(═NR₉)R, —C(O)N(R)OR, and a 5- to 14-membered heterocycloalkyl having one or more heteroatoms selected from N, O, and S which is substituted with one or more substituents selected from oxo (═O), OH, amino, mono- or di-alkylamino, and C₁₋₃ alkyl, and each n is independently selected from 1, 2, 3, 4, and 5;

[0196] each R₅ is independently selected from the group consisting of C₁₋₃ alkyl, C₂₋₃ alkenyl, and H;

[0197] each R₆ is independently selected from the group consisting of C₁₋₃ alkyl, C₂₋₃ alkenyl, and H;

[0198] M and M′ are independently selected from —C(O)O—, —OC(O)—, —C(O)N(R′)—, —N(R′)C(O)—, —C(O)—, —C(S)—, —C(S)S—, —SC(S)—, —CH(OH)—, —P(O)(OR′)O—, —S(O)₂—, —S—S—, an aryl group, and a heteroaryl group;

[0199] R₇ is selected from the group consisting of C₁₋₃ alkyl, C₂₋₃ alkenyl, and H;

[0200] R₈ is selected from the group consisting of C₃₋₆ carbocycle and heterocycle;

[0201] R₉ is selected from the group consisting of H, CN, NO₂, C₁₋₆ alkyl, —OR, —S(O)₂R, —S(O)₂N(R)₂, C₂₋₆ alkenyl, C₃₋₆ carbocycle and heterocycle;

[0202] each R is independently selected from the group consisting of C₁₋₃ alkyl, C₂₋₃ alkenyl, and H;

[0203] each R′ is independently selected from the group consisting of C₁₋₁₈ alkyl, C₂₋₁₈ alkenyl, —R*YR″, —YR″, and H;

[0204] each R″ is independently selected from the group consisting of C₃₋₁₄ alkyl and C₃₋₁₄ alkenyl;

[0205] each R* is independently selected from the group consisting of C₁₋₁₂ alkyl and C₂₋₁₂ alkenyl;

[0206] each Y is independently a C₃₋₆ carbocycle;

[0207] each X is independently selected from the group consisting of F, Cl, Br, and I; and

[0208] m is selected from 5, 6, 7, 8, 9, 10, 11, 12, and 13, or salts or isomers thereof.

[0209] In some embodiments, another subset of compounds of Formula (I) includes those in which

[0210] R₁ is selected from the group consisting of C₅₋₃₀ alkyl, C₅₋₂₀ alkenyl, —R*YR″, —YR″, and —R″M′R′;

[0211] R₂ and R₃ are independently selected from the group consisting of H, C₁₋₁₄ alkyl, C₂₋₁₄ alkenyl, —R*YR″, —YR″, and —R*OR″, or R₂ and R₃, together with the atom to which they are attached, form a heterocycle or carbocycle;

[0212] R₄ is selected from the group consisting of a C₃₋₆ carbocycle, —(CH₂)ₙQ, —(CH₂)ₙCHQR, —CHQR, —CQ(R)₂, and unsubstituted C₁₋₆ alkyl, where Q is selected from a C₃₋₆ carbocycle, a 5- to 14-membered heterocycle having one or more heteroatoms selected from N, O, and S, —OR, —O(CH₂)ₙN(R)₂, —C(O)OR, —OC(O)R, —CX₃, —CX₂H, —CXH₂, —CN, —C(O)N(R)₂, —N(R)C(O)R, —N(R)S(O)₂R, —N(R)C(O)N(R)₂, —N(R)C(S)N(R)₂, —CRN(R)₂C(O)OR, —N(R)R₈, —O(CH₂)ₙOR, —N(R)C(═NR₉)N(R)₂, —N(R)C(═CHR₉)N(R)₂, —OC(O)N(R)₂, —N(R)C(O)OR, —N(OR)C(O)R, —N(OR)S(O)₂R, —N(OR)C(O)OR, —N(OR)C(O)N(R)₂, —N(OR)C(S)N(R)₂, —N(OR)C(═NR₉)N(R)₂, —N(OR)C(═CHR₉)N(R)₂, —C(═NR₉)R, —C(O)N(R)OR, and —C(═NR₉)N(R)₂, and each n is independently selected from 1, 2, 3, 4, and 5; and when Q is a 5- to 14-membered heterocycle and (i) R₄ is —(CH₂)ₙQ in which n is 1 or 2, or (ii) R₄ is —(CH₂)ₙCHQR in which n is 1, or (iii) R₄ is —CHQR, and —CQ(R)₂, then Q is either a 5- to 14-membered heteroaryl or 8- to 14-membered heterocycloalkyl;

[0213] each R₅ is independently selected from the group consisting of C₁₋₃ alkyl, C₂₋₃ alkenyl, and H;

[0214] each R₆ is independently selected from the group consisting of C₁₋₃ alkyl, C₂₋₃ alkenyl, and H;

[0215] M and M′ are independently selected from —C(O)O—, —OC(O)—, —C(O)N(R′)—, —N(R′)C(O)—, —C(O)—, —C(S)—, —C(S)S—, —SC(S)—, —CH(OH)—, —P(O)(OR′)O—, —S(O)₂—, —S—S—, an aryl group, and a heteroaryl group;

[0216] R₇ is selected from the group consisting of C₁₋₃ alkyl, C₂₋₃ alkenyl, and H;

[0217] R₈ is selected from the group consisting of C₃₋₆ carbocycle and heterocycle;

[0218] R₉ is selected from the group consisting of H, CN, NO₂, C₁₋₆ alkyl, —OR, —S(O)₂R, —S(O)₂N(R)₂, C₂₋₆ alkenyl, C₃₋₆ carbocycle and heterocycle;

[0219] each R is independently selected from the group consisting of C₁₋₃ alkyl, C₂₋₃ alkenyl, and H;

[0220] each R′ is independently selected from the group consisting of C₁₋₁₈ alkyl, C₂₋₁₈ alkenyl, —R*YR″, —YR″, and H;

[0221] each R″ is independently selected from the group consisting of C₃₋₁₄ alkyl and C₃₋₁₄ alkenyl;

[0222] each R* is independently selected from the group consisting of C₁₋₁₂ alkyl and C₂₋₁₂ alkenyl;

[0223] each Y is independently a C₃₋₆ carbocycle;

[0224] each X is independently selected from the group consisting of F, Cl, Br, and I; and

[0225] m is selected from 5, 6, 7, 8, 9, 10, 11, 12, and 13, or salts or isomers thereof.

[0226] In some embodiments, another subset of compounds of Formula (I) includes those in which

[0227] R₁ is selected from the group consisting of C₅₋₃₀ alkyl, C₅₋₂₀ alkenyl, —R*YR″, —YR″, and —R″M′R′;

[0228] R₂ and R₃ are independently selected from the group consisting of H, C₁₋₁₄ alkyl, C₂₋₁₄ alkenyl, —R*YR″, —YR″, and —R*OR″, or R₂ and R₃, together with the atom to which they are attached, form a heterocycle or carbocycle;

[0229] R₄ is selected from the group consisting of a C₃₋₆ carbocycle, —(CH₂)ₙQ, —(CH₂)ₙCHQR, —CHQR, —CQ(R)₂, and unsubstituted C₁₋₆ alkyl, where Q is selected from a C₃₋₆ carbocycle, a 5- to 14-membered heteroaryl having one or more heteroatoms selected from N, O, and S, —OR, —O(CH₂)ₙN(R)₂, —C(O)OR, —OC(O)R, —CX₃, —CX₂H, —CXH₂, —CN, —C(O)N(R)₂, —N(R)C(O)R, —N(R)S(O)₂R, —N(R)C(O)N(R)₂, —N(R)C(S)N(R)₂, —CRN(R)₂C(O)OR, —N(R)R₈, —O(CH₂)ₙOR, —N(R)C(═NR₉)N(R)₂, —N(R)C(═CHR₉)N(R)₂, —OC(O)N(R)₂, —N(R)C(O)OR, —N(OR)C(O)R, —N(OR)S(O)₂R, —N(OR)C(O)OR, —N(OR)C(O)N(R)₂, —N(OR)C(S)N(R)₂, —N(OR)C(═NR₉)N(R)₂, —N(OR)C(═CHR₉)N(R)₂, —C(═NR₉)R, —C(O)N(R)OR, and —C(═NR₉)N(R)₂, and each n is independently selected from 1, 2, 3, 4, and 5;

[0230] each R₅ is independently selected from the group consisting of C₁₋₃ alkyl, C₂₋₃ alkenyl, and H;

[0231] each R₆ is independently selected from the group consisting of C₁₋₃ alkyl, C₂₋₃ alkenyl, and H;

[0232] M and M′ are independently selected from —C(O)O—, —OC(O)—, —C(O)N(R′)—, —N(R′)C(O)—, —C(O)—, —C(S)—, —C(S)S—, —SC(S)—, —CH(OH)—, —P(O)(OR′)O—, —S(O)₂—, —S—S—, an aryl group, and a heteroaryl group;

[0233] R₇ is selected from the group consisting of C₁₋₃ alkyl, C₂₋₃ alkenyl, and H;

[0234] R₈ is selected from the group consisting of C₃₋₆ carbocycle and heterocycle;

[0235] R₉ is selected from the group consisting of H, CN, NO₂, C₁₋₆ alkyl, —OR, —S(O)₂R, —S(O)₂N(R)₂, C₂₋₆ alkenyl, C₃₋₆ carbocycle and heterocycle;

[0236] each R is independently selected from the group consisting of C₁₋₃ alkyl, C₂₋₃ alkenyl, and H;

[0237] each R′ is independently selected from the group consisting of C₁₋₁₈ alkyl, C₂₋₁₈ alkenyl, —R*YR″, —YR″, and H;

[0238] each R″ is independently selected from the group consisting of C₃₋₁₄ alkyl and C₃₋₁₄ alkenyl;

[0239] each R* is independently selected from the group consisting of C₁₋₁₂ alkyl and C₂₋₁₂ alkenyl;

[0240] each Y is independently a C₃₋₆ carbocycle;

[0241] each X is independently selected from the group consisting of F, Cl, Br, and I; and

[0242] m is selected from 5, 6, 7, 8, 9, 10, 11, 12, and 13, or salts or isomers thereof.

[0243] In some embodiments, another subset of compounds of Formula (I) includes those in which

[0244] R₁ is selected from the group consisting of C₅₋₃₀ alkyl, C₅₋₂₀ alkenyl, —R*YR″, —YR″, and —R″M′R′;

[0245] R₂ and R₃ are independently selected from the group consisting of H, C₂₋₁₄ alkyl, C₂₋₁₄ alkenyl, —R*YR″, —YR″, and —R*OR″, or R₂ and R₃, together with the atom to which they are attached, form a heterocycle or carbocycle;

[0246] R₄ is —(CH₂)ₙQ or —(CH₂)ₙCHQR, where Q is —N(R)₂, and n is selected from 3, 4, and 5; each R₅ is independently selected from the group consisting of C₁₋₃ alkyl, C₂₋₃ alkenyl, and H;

[0247] each R₆ is independently selected from the group consisting of C₁₋₃ alkyl, C₂₋₃ alkenyl, and H;

[0248] M and M′ are independently selected from —C(O)O—, —OC(O)—, —C(O)N(R′)—, —N(R′)C(O)—, —C(O)—, —C(S)—, —C(S)S—, —SC(S)—, —CH(OH)—, —P(O)(OR′)O—, —S(O)₂—, —S—S—, an aryl group, and a heteroaryl group;

[0249] R₇ is selected from the group consisting of C₁₋₃ alkyl, C₂₋₃ alkenyl, and H;

[0250] each R is independently selected from the group consisting of C₁₋₃ alkyl, C₂₋₃ alkenyl, and H;

[0251] each R′ is independently selected from the group consisting of C₁₋₁₈ alkyl, C₂₋₁₈ alkenyl, —R*YR″, —YR″, and H;

[0252] each R″ is independently selected from the group consisting of C₃₋₁₄ alkyl and C₃₋₁₄ alkenyl;

[0253] each R* is independently selected from the group consisting of C₁₋₁₂ alkyl and C₁₋₁₂ alkenyl;

[0254] each Y is independently a C₃₋₆ carbocycle;

[0255] each X is independently selected from the group consisting of F, Cl, Br, and I; and

[0256] m is selected from 5, 6, 7, 8, 9, 10, 11, 12, and 13, or salts or isomers thereof.

[0257] In some embodiments, another subset of compounds of Formula (I) includes those in which

[0258] R₁ is selected from the group consisting of C₅₋₃₀ alkyl, C₅₋₂₀ alkenyl, —R*YR″, —YR″, and —R″M′R′;

[0259] R₂ and R₃ are independently selected from the group consisting of C₁₋₁₄ alkyl, C₂₋₁₄ alkenyl, —R*YR″, —YR″, and —R*OR″, or R₂ and R₃, together with the atom to which they are attached, form a heterocycle or carbocycle;

[0260] R₄ is selected from the group consisting of —(CH₂)ₙQ, —(CH₂)ₙCHQR, —CHQR, and —CQ(R)₂, where Q is —N(R)₂, and n is selected from 1, 2, 3, 4, and 5;

[0261] each R₅ is independently selected from the group consisting of C₁₋₃ alkyl, C₂₋₃ alkenyl, and H;

[0262] each R₆ is independently selected from the group consisting of C₁₋₃ alkyl, C₂₋₃ alkenyl, and H;

[0263] M and M′ are independently selected from —C(O)O—, —OC(O)—, —C(O)N(R′)—, —N(R′)C(O)—, —C(O)—, —C(S)—, —C(S)S—, —SC(S)—, —CH(OH)—, —P(O)(OR′)O—, —S(O)₂—, —S—S—, an aryl group, and a heteroaryl group;

[0264] R₇ is selected from the group consisting of C₁₋₃ alkyl, C₂₋₃ alkenyl, and H;

[0265] each R is independently selected from the group consisting of C₁₋₃ alkyl, C₂₋₃ alkenyl, and H;

[0266] each R′ is independently selected from the group consisting of C₁₋₁₈ alkyl, C₂₋₁₈ alkenyl, —R*YR″, —YR″, and H;

[0267] each R″ is independently selected from the group consisting of C₃₋₁₄ alkyl and C₃₋₁₄ alkenyl;

[0268] each R* is independently selected from the group consisting of C₁₋₁₂ alkyl and C₁₋₁₂ alkenyl;

[0269] each Y is independently a C₃₋₆ carbocycle;

[0270] each X is independently selected from the group consisting of F, Cl, Br, and I; and

[0271] m is selected from 5, 6, 7, 8, 9, 10, 11, 12, and 13, or salts or isomers thereof.

[0272] In some embodiments, a subset of compounds of Formula (I) includes those of Formula (IA):

[chemical structure]

[0273] or a salt or isomer thereof, wherein 1 is selected from 1, 2, 3, 4, and 5; m is selected from 5, 6, 7, 8, and 9; M₁ is a bond or M′; R₄ is unsubstituted C₁₋₃ alkyl, or —(CH₂)ₙQ, in which Q is OH, —NHC(S)N(R)₂, —NHC(O)N(R)₂, —N(R)C(O)R, —N(R)S(O)₂R, —N(R)R₈, —NHC(═NR₉)N(R)₂, —NHC(═CHR₉)N(R)₂, —OC(O)N(R)₂, —N(R)C(O)OR, heteroaryl or heterocycloalkyl; M and M′ are independently selected from —C(O)O—, —OC(O)—, —C(O)N(R′)—, —P(O)(OR′)O—, —S—S—, an aryl group, and a heteroaryl group; and R₂ and R₃ are independently selected from the group consisting of H, C₁₋₁₄ alkyl, and C₂₋₁₄ alkenyl.

[0274] In some embodiments, a subset of compounds of Formula (I) includes those of Formula (II):

[chemical structure]

or a salt or isomer thereof, wherein 1 is selected from 1, 2, 3, 4, and 5; M₁ is a bond or M′; R₄ is unsubstituted C₁₋₃ alkyl, or —(CH₂)ₙQ, in which n is 2, 3, or 4, and Q is OH, —NHC(S)N(R)₂, —NHC(O)N(R)₂, —N(R)C(O)R, —N(R)S(O)₂R, —N(R)R₈, —NHC(═NR₉)N(R)₂, —NHC(═CHR₉)N(R)₂, —OC(O)N(R)₂, —N(R)C(O)OR, heteroaryl or heterocycloalkyl; M and M′ are independently selected from —C(O)O—, —OC(O)—, —C(O)N(R′)—, —P(O)(OR′)O—, —S—S—, an aryl group, and a heteroaryl group; and R₂ and R₃ are independently selected from the group consisting of H, C₁₋₁₄ alkyl, and C₂₋₁₄ alkenyl.

[0275] In some embodiments, a subset of compounds of Formula (I) includes those of Formula (IIa), (IIb), (IIc), or (IIe):

[chemical structure]

or a salt or isomer thereof, wherein R₄ is as described herein.

[0276] In some embodiments, a subset of compounds of Formula (I) includes those of Formula (IId):

[chemical structure]

[0277] or a salt or isomer thereof, wherein n is 2, 3, or 4; and m, R′, R″, and R₂ through R₆ are as described herein. For example, each of R₂ and R₃ may be independently selected from the group consisting of C₅₋₁₄ alkyl and C₅₋₁₄ alkenyl.

[0278] In some embodiments, an ionizable cationic lipid of the disclosure comprises a compound having structure:

[chemical structure]

[0279] In some embodiments, an ionizable cationic lipid of the disclosure comprises a compound having structure:

[chemical structure]

[0280] In some embodiments, a non-cationic lipid of the disclosure comprises 1,2-distearoyl-sn-glycero-3-phosphocholine (DSPC), 1,2-dioleoyl-sn-glycero-3-phosphoethanolamine (DOPE), 1,2-dilinoleoyl-sn-glycero-3-phosphocholine (DLPC), 1,2-dimyristoyl-sn-gly cero-phosphocholine (DMPC), 1,2-dioleoyl-sn-glycero-3-phosphocholine (DOPC), 1,2-dipalmitoyl-sn-glycero-3-phosphocholine (DPPC), 1,2-diundecanoyl-sn-glycero-phosphocholine (DUPC), 1-palmitoyl-2-oleoyl-sn-glycero-3-phosphocholine (POPC), 1,2-di-O-octadecenyl-sn-glycero-3-phosphocholine (18:0 Diether PC), 1-oleoyl-2 cholesterylhemisuccinoyl-sn-glycero-3-phosphocholine (OChemsPC), 1-hexadecyl-sn-glycero-3-phosphocholine (C16 Lyso PC), 1,2-dilinolenoyl-sn-glycero-3-phosphocholine, 1,2-diarachidonoyl-sn-glycero-3-phosphocholine, 1,2-didocosahexaenoyl-sn-glycero-3-phosphocholine, 1,2-diphytanoyl-sn-glycero phosphoethanolamine (ME 16.0 PE), 1,2-distearoyl-sn-glycero-3-phosphoethanolamine, 1,2-dilinoleoyl-sn-glycero-3-phosphoethanolamine, 1,2-dilinolenoyl-sn-glycero phosphoethanolamine, 1,2-diarachidonoyl-sn-glycero-3-phosphoethanolamine, 1,2-didocosahexaenoyl-sn-glycero-3-phosphoethanolamine, 1,2-dioleoyl-sn-glycero-3-phospho-rac-(1-glycerol) sodium salt (DOPG), sphingomyelin, and mixtures thereof.

[0281] In some embodiments, a PEG modified lipid of the disclosure comprises a PEG-modified phosphatidylethanolamine, a PEG-modified phosphatidic acid, a PEG-modified ceramide, a PEG-modified dialkylamine, a PEG-modified diacylglycerol, a PEG-modified dialkylglycerol, and mixtures thereof. In some embodiments, the PEG-modified lipid is DMG-PEG, PEG-c-DOMG (also referred to as PEG-DOMG), PEG-DSG and/or PEG-DPG.

[0282] In some embodiments, a sterol of the disclosure comprises cholesterol, fecosterol, sitosterol, ergosterol, campesterol, stigmasterol, brassicasterol, tomatidine, ursolic acid, alpha-tocopherol, and mixtures thereof.

[0283] In some embodiments, a LNP of the disclosure comprises an ionizable cationic lipid of Compound 1, wherein the non-cationic lipid is DSPC, the structural lipid that is cholesterol, and the PEG lipid is DMG-PEG.

[0284] In some embodiments, the lipid nanoparticle comprises 45-55 mole percent (mol %) ionizable cationic lipid. For example, lipid nanoparticle may comprise 45, 46, 47, 48, 49, 50, 51, 52, 53, 54, or 55 mol % ionizable cationic lipid.

[0285] In some embodiments, the lipid nanoparticle comprises 5-15 mol % DSPC. For example, the lipid nanoparticle may comprise 5, 6, 7, 8, 9, 10, 11, 12, 13, 14, or 15 mol % DSPC.

[0286] In some embodiments, the lipid nanoparticle comprises 35-40 mol % cholesterol. For example, the lipid nanoparticle may comprise 35, 36, 37, 38, 39, or 40 mol % cholesterol.

[0287] In some embodiments, the lipid nanoparticle comprises 1-2 mol % DMG-PEG. For example, the lipid nanoparticle may comprise 1, 1.5, or 2 mol % DMG-PEG.

[0288] In some embodiments, the lipid nanoparticle comprises 50 mol % ionizable cationic lipid, 10 mol % DSPC, 38.5 mol % cholesterol, and 1.5 mol % DMG-PEG.

[0289] In some embodiments, a LNP of the disclosure comprises an N:P ratio of from about 2:1 to about 30:1.

[0290] In some embodiments, a LNP of the disclosure comprises an N:P ratio of about 6:1.

[0291] In some embodiments, a LNP of the disclosure comprises an N:P ratio of about 3:1.

[0292] In some embodiments, a LNP of the disclosure comprises a wt/wt ratio of the ionizable cationic lipid component to the RNA of from about 10:1 to about 100:1.

[0293] In some embodiments, a LNP of the disclosure comprises a wt/wt ratio of the ionizable cationic lipid component to the RNA of about 20:1.

[0294] In some embodiments, a LNP of the disclosure comprises a wt/wt ratio of the ionizable cationic lipid component to the RNA of about 10:1.

[0295] In some embodiments, a LNP of the disclosure has a mean diameter from about 50 nm to about 150 nm.

[0296] In some embodiments, a LNP of the disclosure has a mean diameter from about 70 nm to about 120 nm.

### Multivalent Vaccines

[0297] The compositions, as provided herein, may include RNA or multiple RNAs encoding two or more antigens of the same or different species. In some embodiments, composition includes an RNA or multiple RNAs encoding two or more coronavirus antigens. In some embodiments, the RNA may encode 1, 2, 3, 4, 5, 6, 7, 8, 9, 10, 11, 12, or more coronavirus antigens.

[0298] In some embodiments, two or more different RNA (e.g., mRNA) encoding antigens may be formulated in the same lipid nanoparticle. In other embodiments, two or more different RNA encoding antigens may be formulated in separate lipid nanoparticles (each RNA formulated in a single lipid nanoparticle). The lipid nanoparticles may then be combined and administered as a single vaccine composition (e.g., comprising multiple RNA encoding multiple antigens) or may be administered separately.

### Combination Vaccines

[0299] The compositions, as provided herein, may include an RNA or multiple RNAs encoding two or more antigens of the same or different viral strains. Also provided herein are combination vaccines that include RNA encoding one or more coronavirus and one or more antigen(s) of a different organism. Thus, the vaccines of the present disclosure may be combination vaccines that target one or more antigens of the same strain/species, or one or more antigens of different strains/species, e.g., antigens which induce immunity to organisms which are found in the same geographic areas where the risk of coronavirus infection is high or organisms to which an individual is likely to be exposed to when exposed to a coronavirus.

### Pharmaceutical Formulations

[0300] Provided herein are compositions (e.g., pharmaceutical compositions), methods, kits and reagents for prevention or treatment of coronavirus in humans and other mammals, for example. The compositions provided herein can be used as therapeutic or prophylactic agents. They may be used in medicine to prevent and/or treat a coronavirus infection.

[0301] In some embodiments, the coronavirus vaccine containing RNA as described herein can be administered to a subject (e.g., a mammalian subject, such as a human subject), and the RNA polynucleotides are translated in vivo to produce an antigenic polypeptide (antigen).

[0302] An “effective amount” of a composition (e.g., comprising RNA) is based, at least in part, on the target tissue, target cell type, means of administration, physical characteristics of the RNA (e.g., length, nucleotide composition, and/or extent of modified nucleosides), other components of the vaccine, and other determinants, such as age, body weight, height, sex and general health of the subject. Typically, an effective amount of a composition provides an induced or boosted immune response as a function of antigen production in the cells of the subject. In some embodiments, an effective amount of the composition containing RNA polynucleotides having at least one chemical modifications are more efficient than a composition containing a corresponding unmodified polynucleotide encoding the same antigen or a peptide antigen. Increased antigen production may be demonstrated by increased cell transfection (the percentage of cells transfected with the RNA vaccine), increased protein translation and/or expression from the polynucleotide, decreased nucleic acid degradation (as demonstrated, for example, by increased duration of protein translation from a modified polynucleotide), or altered antigen specific immune response of the host cell.

[0303] The term “pharmaceutical composition” refers to the combination of an active agent with a carrier, inert or active, making the composition especially suitable for diagnostic or therapeutic use in vivo or ex vivo. A “pharmaceutically acceptable carrier,” after administered to or upon a subject, does not cause undesirable physiological effects. The carrier in the pharmaceutical composition must be “acceptable” also in the sense that it is compatible with the active ingredient and can be capable of stabilizing it. One or more solubilizing agents can be utilized as pharmaceutical carriers for delivery of an active agent. Examples of a pharmaceutically acceptable carrier include, but are not limited to, biocompatible vehicles, adjuvants, additives, and diluents to achieve a composition usable as a dosage form. Examples of other carriers include colloidal silicon oxide, magnesium stearate, cellulose, and sodium lauryl sulfate. Additional suitable pharmaceutical carriers and diluents, as well as pharmaceutical necessities for their use, are described in Remington's Pharmaceutical Sciences.

[0304] In some embodiments, the compositions (comprising polynucleotides and their encoded polypeptides) in accordance with the present disclosure may be used for treatment or prevention of a coronavirus infection. A composition may be administered prophylactically or therapeutically as part of an active immunization scheme to healthy individuals or early in infection during the incubation phase or during active infection after onset of symptoms. In some embodiments, the amount of RNA provided to a cell, a tissue or a subject may be an amount effective for immune prophylaxis.

[0305] A composition may be administered with other prophylactic or therapeutic compounds. As a non-limiting example, a prophylactic or therapeutic compound may be an adjuvant or a booster. As used herein, when referring to a prophylactic composition, such as a vaccine, the term “booster” refers to an extra administration of the prophylactic (vaccine) composition. A booster (or booster vaccine) may be given after an earlier administration of the prophylactic composition. The time of administration between the initial administration of the prophylactic composition and the booster may be, but is not limited to, 1 minute, 2 minutes, 3 minutes, 4 minutes, 5 minutes, 6 minutes, 7 minutes, 8 minutes, 9 minutes, 10 minutes, 15 minutes, 20 minutes 35 minutes, 40 minutes, 45 minutes, 50 minutes, 55 minutes, 1 hour, 2 hours, 3 hours, 4 hours, 5 hours, 6 hours, 7 hours, 8 hours, 9 hours, 10 hours, 11 hours, 12 hours, 13 hours, 14 hours, 15 hours, 16 hours, 17 hours, 18 hours, 19 hours, 20 hours, 21 hours, 22 hours, 23 hours, 1 day, 36 hours, 2 days, 3 days, 4 days, 5 days, 6 days, 1 week, 10 days, 2 weeks, 3 weeks, 1 month, 2 months, 3 months, 4 months, 5 months, 6 months, 7 months, 8 months, 9 months, 10 months, 11 months, 1 year, 18 months, 2 years, 3 years, 4 years, 5 years, 6 years, 7 years, 8 years, 9 years, 10 years, 11 years, 12 years, 13 years, 14 years, 15 years, 16 years, 17 years, 18 years, 19 years, 20 years, 25 years, 30 years, 35 years, 40 years, 45 years, 50 years, 55 years, 60 years, 65 years, 70 years, 75 years, 80 years, 85 years, 90 years, 95 years or more than 99 years. In exemplary embodiments, the time of administration between the initial administration of the prophylactic composition and the booster may be, but is not limited to, 1 week, 2 weeks, 3 weeks, 1 month, 2 months, 3 months, 6 months or 1 year.

[0306] In some embodiments, a composition may be administered intramuscularly, intranasally or intradermally, similarly to the administration of inactivated vaccines known in the art.

[0307] A composition may be utilized in various settings depending on the prevalence of the infection or the degree or level of unmet medical need. As a non-limiting example, the RNA vaccines may be utilized to treat and/or prevent a variety of infectious disease. RNA vaccines have superior properties in that they produce much larger antibody titers, better neutralizing immunity, produce more durable immune responses, and/or produce responses earlier than commercially available vaccines.

[0308] Provided herein are pharmaceutical compositions including RNA and/or complexes optionally in combination with one or more pharmaceutically acceptable excipients.

[0309] The RNA may be formulated or administered alone or in conjunction with one or more other components. For example, an immunizing composition may comprise other components including, but not limited to, adjuvants.

[0310] In some embodiments, an immunizing composition does not include an adjuvant (they are adjuvant free).

[0311] An RNA may be formulated or administered in combination with one or more pharmaceutically-acceptable excipients. In some embodiments, vaccine compositions comprise at least one additional active substances, such as, for example, a therapeutically-active substance, a prophylactically-active substance, or a combination of both. Vaccine compositions may be sterile, pyrogen-free or both sterile and pyrogen-free. General considerations in the formulation and/or manufacture of pharmaceutical agents, such as vaccine compositions, may be found, for example, in Remington: The Science and Practice of Pharmacy 21st ed., Lippincott Williams & Wilkins, 2005 (incorporated herein by reference in its entirety).

[0312] In some embodiments, an immunizing composition is administered to humans, human patients or subjects. For the purposes of the present disclosure, the phrase “active ingredient” generally refers to the RNA vaccines or the polynucleotides contained therein, for example, RNA polynucleotides (e.g., mRNA polynucleotides) encoding antigens.

[0313] Formulations of the vaccine compositions described herein may be prepared by any method known or hereafter developed in the art of pharmacology. In general, such preparatory methods include the step of bringing the active ingredient (e.g., mRNA polynucleotide) into association with an excipient and/or one or more other accessory ingredients, and then, if necessary and/or desirable, dividing, shaping and/or packaging the product into a desired single- or multi-dose unit.

[0314] Relative amounts of the active ingredient, the pharmaceutically acceptable excipient, and/or any additional ingredients in a pharmaceutical composition in accordance with the disclosure will vary, depending upon the identity, size, and/or condition of the subject treated and further depending upon the route by which the composition is to be administered. By way of example, the composition may comprise between 0.1% and 100%, e.g., between 0.5 and 50%, between 1-30%, between 5-80%, at least 80% (w/w) active ingredient.

[0315] In some embodiments, an RNA is formulated using one or more excipients to: (1) increase stability; (2) increase cell transfection; (3) permit the sustained or delayed release (e.g., from a depot formulation); (4) alter the biodistribution (e.g., target to specific tissues or cell types); (5) increase the translation of encoded protein in vivo; and/or (6) alter the release profile of encoded protein (antigen) in vivo. In addition to traditional excipients such as any and all solvents, dispersion media, diluents, or other liquid vehicles, dispersion or suspension aids, surface active agents, isotonic agents, thickening or emulsifying agents, preservatives, excipients can include, without limitation, lipidoids, liposomes, lipid nanoparticles, polymers, lipoplexes, core-shell nanoparticles, peptides, proteins, cells transfected with the RNA (e.g., for transplantation into a subject), hyaluronidase, nanoparticle mimics and combinations thereof.

### Dosing/Administration

[0316] Provided herein are immunizing compositions (e.g., RNA vaccines), methods, kits and reagents for prevention and/or treatment of coronavirus infection in humans and other mammals. Immunizing compositions can be used as therapeutic or prophylactic agents. In some embodiments, immunizing compositions are used to provide prophylactic protection from coronavirus infection. In some embodiments, immunizing compositions are used to treat a coronavirus infection. In some embodiments, embodiments, immunizing compositions are used in the priming of immune effector cells, for example, to activate peripheral blood mononuclear cells (PBMCs) ex vivo, which are then infused (re-infused) into a subject.

[0317] A subject may be any mammal, including non-human primate and human subjects. Typically, a subject is a human subject.

[0318] In some embodiments, an immunizing composition (e.g., RNA a vaccine) is administered to a subject (e.g., a mammalian subject, such as a human subject) in an effective amount to induce an antigen-specific immune response. The RNA encoding the coronavirus antigen is expressed and translated in vivo to produce the antigen, which then stimulates an immune response in the subject.

[0319] Prophylactic protection from a coronavirus can be achieved following administration of an immunizing composition (e.g., an RNA vaccine) of the present disclosure. Immunizing compositions can be administered once, twice, three times, four times or more but it is likely sufficient to administer the vaccine once (optionally followed by a single booster). It is possible, although less desirable, to administer an immunizing compositions to an infected individual to achieve a therapeutic response. Dosing may need to be adjusted accordingly.

[0320] A method of eliciting an immune response in a subject against a coronavirus antigen (or multiple antigens) is provided in aspects of the present disclosure. In some embodiments, a method involves administering to the subject an immunizing composition comprising a RNA (e.g., mRNA) having an open reading frame encoding a coronavirus antigen, thereby inducing in the subject an immune response specific to the coronavirus antigen, wherein anti-antigen antibody titer in the subject is increased following vaccination relative to anti-antigen antibody titer in a subject vaccinated with a prophylactically effective dose of a traditional vaccine against the antigen. An “anti-antigen antibody” is a serum antibody the binds specifically to the antigen.

[0321] A prophylactically effective dose is an effective dose that prevents infection with the virus at a clinically acceptable level. In some embodiments, the effective dose is a dose listed in a package insert for the vaccine. A traditional vaccine, as used herein, refers to a vaccine other than the mRNA vaccines of the present disclosure. For instance, a traditional vaccine includes, but is not limited, to live microorganism vaccines, killed microorganism vaccines, subunit vaccines, protein antigen vaccines, DNA vaccines, virus like particle (VLP) vaccines, etc. In exemplary embodiments, a traditional vaccine is a vaccine that has achieved regulatory approval and/or is registered by a national drug regulatory body, for example the Food and Drug Administration (FDA) in the United States or the European Medicines Agency (EMA).

[0322] In some embodiments, the anti-antigen antibody titer in the subject is increased 1 log to 10 log following vaccination relative to anti-antigen antibody titer in a subject vaccinated with a prophylactically effective dose of a traditional vaccine against the coronavirus or an unvaccinated subject. In some embodiments, the anti-antigen antibody titer in the subject is increased 1 log, 2 log, 3 log, 4 log, 5 log, or 10 log following vaccination relative to anti-antigen antibody titer in a subject vaccinated with a prophylactically effective dose of a traditional vaccine against the coronavirus or an unvaccinated subject.

[0323] A method of eliciting an immune response in a subject against a coronavirus is provided in other aspects of the disclosure. The method involves administering to the subject an immunizing composition (e.g., an RNA vaccine) comprising a RNA polynucleotide comprising an open reading frame encoding a coronavirus antigen, thereby inducing in the subject an immune response specific to the coronavirus, wherein the immune response in the subject is equivalent to an immune response in a subject vaccinated with a traditional vaccine against the coronavirus at 2 times to 100 times the dosage level relative to the immunizing composition.

[0324] In some embodiments, the immune response in the subject is equivalent to an immune response in a subject vaccinated with a traditional vaccine at twice the dosage level relative to an immunizing composition of the present disclosure. In some embodiments, the immune response in the subject is equivalent to an immune response in a subject vaccinated with a traditional vaccine at three times the dosage level relative to an immunizing composition of the present disclosure. In some embodiments, the immune response in the subject is equivalent to an immune response in a subject vaccinated with a traditional vaccine at 4 times, 5 times, 10 times, 50 times, or 100 times the dosage level relative to an immunizing composition of the present disclosure. In some embodiments, the immune response in the subject is equivalent to an immune response in a subject vaccinated with a traditional vaccine at 10 times to 1000 times the dosage level relative to an immunizing composition of the present disclosure. In some embodiments, the immune response in the subject is equivalent to an immune response in a subject vaccinated with a traditional vaccine at 100 times to 1000 times the dosage level relative to an immunizing composition of the present disclosure.

[0325] In other embodiments, the immune response is assessed by determining [protein] antibody titer in the subject. In other embodiments, the ability of serum or antibody from an immunized subject is tested for its ability to neutralize viral uptake or reduce coronavirus transformation of human B lymphocytes. In other embodiments, the ability to promote a robust T cell response(s) is measured using art recognized techniques.

[0326] Other aspects the disclosure provide methods of eliciting an immune response in a subject against a coronavirus by administering to the subject an immunizing composition (e.g., an RNA vaccine) comprising an RNA having an open reading frame encoding a coronavirus antigen, thereby inducing in the subject an immune response specific to the coronavirus antigen, wherein the immune response in the subject is induced 2 days to 10 weeks earlier relative to an immune response induced in a subject vaccinated with a prophylactically effective dose of a traditional vaccine against the coronavirus. In some embodiments, the immune response in the subject is induced in a subject vaccinated with a prophylactically effective dose of a traditional vaccine at 2 times to 100 times the dosage level relative to an immunizing composition of the present disclosure.

[0327] In some embodiments, the immune response in the subject is induced 2 days, 3 days, 1 week, 2 weeks, 3 weeks, 5 weeks, or 10 weeks earlier relative to an immune response induced in a subject vaccinated with a prophylactically effective dose of a traditional vaccine.

[0328] Also provided herein are methods of eliciting an immune response in a subject against a coronavirus by administering to the subject an RNA having an open reading frame encoding a first antigen, wherein the RNA does not include a stabilization element, and wherein an adjuvant is not co-formulated or co-administered with the vaccine.

[0329] An immunizing composition (e.g., an RNA vaccine) may be administered by any route that results in a therapeutically effective outcome. These include, but are not limited, to intradermal, intramuscular, intranasal, and/or subcutaneous administration. The present disclosure provides methods comprising administering RNA vaccines to a subject in need thereof. The exact amount required will vary from subject to subject, depending on the species, age, and general condition of the subject, the severity of the disease, the particular composition, its mode of administration, its mode of activity, and the like. The RNA is typically formulated in dosage unit form for ease of administration and uniformity of dosage. It will be understood, however, that the total daily usage of the RNA may be decided by the attending physician within the scope of sound medical judgment. The specific therapeutically effective, prophylactically effective, or appropriate imaging dose level for any particular patient will depend upon a variety of factors including the disorder being treated and the severity of the disorder; the activity of the specific compound employed; the specific composition employed; the age, body weight, general health, sex and diet of the patient; the time of administration, route of administration, and rate of excretion of the specific compound employed; the duration of the treatment; drugs used in combination or coincidental with the specific compound employed; and like factors well known in the medical arts.

[0330] The effective amount of the RNA, as provided herein, may be as low as 20 μg, administered for example as a single dose or as two 10 μg doses. In some embodiments, the effective amount is a total dose of 20 μg-300 μg or 25 μg-300 For example, the effective amount may be a total dose of 20 μg, 25 μg, 30 μg, 35 μg, 40 μg, 45 μg, 50 μg, 55 μg, 60 μg, 65 μg, 70 μg, 75 μg, 80 μg, 85 μg, 90 μg, 95 μg, 100 μg, 110 μg, 120 μg, 130 μg, 140 μg, 150 μg, 160 μg, 170 μg, 180 μg, 190 μg, 200 μg, 250 μg, or 300 In some embodiments, the effective amount is a total dose of 20 μg. In some embodiments, the effective amount is a total dose of 25 μg. In some embodiments, the effective amount is a total dose of 75 μg. In some embodiments, the effective amount is a total dose of 150 μg. In some embodiments, the effective amount is a total dose of 300 μg.

[0331] The RNA described herein can be formulated into a dosage form described herein, such as an intranasal, intratracheal, or injectable (e.g., intravenous, intraocular, intravitreal, intramuscular, intradermal, intracardiac, intraperitoneal, and subcutaneous).

### Vaccine Efficacy

[0332] Some aspects of the present disclosure provide formulations of the immunizing compositions (e.g., RNA vaccines), wherein the RNA is formulated in an effective amount to produce an antigen specific immune response in a subject (e.g., production of antibodies specific to a coronavirus antigen). “An effective amount” is a dose of the RNA effective to produce an antigen-specific immune response. Also provided herein are methods of inducing an antigen-specific immune response in a subject.

[0333] As used herein, an immune response to a vaccine or LNP of the present disclosure is the development in a subject of a humoral and/or a cellular immune response to a (one or more) coronavirus protein(s) present in the vaccine. For purposes of the present disclosure, a “humoral” immune response refers to an immune response mediated by antibody molecules, including, e.g., secretory (IgA) or IgG molecules, while a “cellular” immune response is one mediated by T-lymphocytes (e.g., CD4+ helper and/or CD8+ T cells (e.g., CTLs) and/or other white blood cells. One important aspect of cellular immunity involves an antigen-specific response by cytolytic T-cells (CTLs). CTLs have specificity for peptide antigens that are presented in association with proteins encoded by the major histocompatibility complex (MHC) and expressed on the surfaces of cells. CTLs help induce and promote the destruction of intracellular microbes or the lysis of cells infected with such microbes. Another aspect of cellular immunity involves and antigen-specific response by helper T-cells. Helper T-cells act to help stimulate the function, and focus the activity nonspecific effector cells against cells displaying peptide antigens in association with MHC molecules on their surface. A cellular immune response also leads to the production of cytokines, chemokines, and other such molecules produced by activated T-cells and/or other white blood cells including those derived from CD4+ and CD8+ T-cells.

[0334] In some embodiments, the antigen-specific immune response is characterized by measuring an anti-coronavirus antigen antibody titer produced in a subject administered an immunizing composition as provided herein. An antibody titer is a measurement of the amount of antibodies within a subject, for example, antibodies that are specific to a particular antigen or epitope of an antigen. Antibody titer is typically expressed as the inverse of the greatest dilution that provides a positive result. Enzyme-linked immunosorbent assay (ELISA) is a common assay for determining antibody titers, for example.

[0335] In some embodiments, an antibody titer is used to assess whether a subject has had an infection or to determine whether immunizations are required. In some embodiments, an antibody titer is used to determine the strength of an autoimmune response, to determine whether a booster immunization is needed, to determine whether a previous vaccine was effective, and to identify any recent or prior infections. In accordance with the present disclosure, an antibody titer may be used to determine the strength of an immune response induced in a subject by an immunizing composition (e.g., RNA vaccine).

[0336] In some embodiments, an anti-coronavirus antigen antibody titer produced in a subject is increased by at least 1 log relative to a control. For example, anti-coronavirus antigen antibody titer produced in a subject may be increased by at least 1.5, at least 2, at least 2.5, or at least 3 log relative to a control. In some embodiments, the anti-coronavirus antigen antibody titer produced in the subject is increased by 1, 1.5, 2, 2.5 or 3 log relative to a control. In some embodiments, the anti-coronavirus antigen antibody titer produced in the subject is increased by 1-3 log relative to a control. For example, the anti-coronavirus antigen antibody titer produced in a subject may be increased by 1-1.5, 1-2, 1-2.5, 1-3, 1.5-2, 1.5-2.5, 1.5-3, 2-2.5, 2-3, or 2.5-3 log relative to a control.

[0337] In some embodiments, the anti-coronavirus antigen antibody titer produced in a subject is increased at least 2 times relative to a control. For example, the anti-coronavirus antigen n antibody titer produced in a subject may be increased at least 3 times, at least 4 times, at least 5 times, at least 6 times, at least 7 times, at least 8 times, at least 9 times, or at least 10 times relative to a control. In some embodiments, the anti-coronavirus antigen antibody titer produced in the subject is increased 2, 3, 4, 5, 6, 7, 8, 9, or 10 times relative to a control. In some embodiments, the anti-coronavirus antigen antibody titer produced in a subject is increased 2-10 times relative to a control. For example, the anti-coronavirus antigen antibody titer produced in a subject may be increased 2-10, 2-9, 2-8, 2-7, 2-6, 2-5, 2-4, 2-3, 3-10, 3-9, 3-8, 3-7, 3-6, 3-5, 3-4, 4-10, 4-9, 4-8, 4-7, 4-6, 4-5, 5-10, 5-9, 5-8, 5-7, 5-6, 6-10, 6-9, 6-8, 6-7, 7-10, 7-9, 7-8, 8-10, 8-9, or 9-10 times relative to a control.

[0338] In some embodiments, an antigen-specific immune response is measured as a ratio of geometric mean titer (GMT), referred to as a geometric mean ratio (GMR), of serum neutralizing antibody titers to coronavirus. A geometric mean titer (GMT) is the average antibody titer for a group of subjects calculated by multiplying all values and taking the nth root of the number, where n is the number of subjects with available data.

[0339] A control, in some embodiments, is an anti-coronavirus antigen antibody titer produced in a subject who has not been administered an immunizing composition (e.g., RNA vaccine). In some embodiments, a control is an anti-coronavirus antigen antibody titer produced in a subject administered a recombinant or purified protein vaccine. Recombinant protein vaccines typically include protein antigens that either have been produced in a heterologous expression system (e.g., bacteria or yeast) or purified from large amounts of the pathogenic organism.

[0340] In some embodiments, the ability of an immunizing composition (e.g., RNA vaccine) to be effective is measured in a murine model. For example, an immunizing composition may be administered to a murine model and the murine model assayed for induction of neutralizing antibody titers. Viral challenge studies may also be used to assess the efficacy of a vaccine of the present disclosure. For example, an immunizing composition may be administered to a murine model, the murine model challenged with virus, and the murine model assayed for survival and/or immune response (e.g., neutralizing antibody response, T cell response (e.g., cytokine response)).

[0341] In some embodiments, an effective amount of an immunizing composition (e.g., RNA vaccine) is a dose that is reduced compared to the standard of care dose of a recombinant protein vaccine. A “standard of care,” as provided herein, refers to a medical or psychological treatment guideline and can be general or specific. “Standard of care” specifies appropriate treatment based on scientific evidence and collaboration between medical professionals involved in the treatment of a given condition. It is the diagnostic and treatment process that a physician/clinician should follow for a certain type of patient, illness or clinical circumstance. A “standard of care dose,” as provided herein, refers to the dose of a recombinant or purified protein vaccine, or a live attenuated or inactivated vaccine, or a VLP vaccine, that a physician/clinician or other medical professional would administer to a subject to treat or prevent coronavirus infection or a related condition, while following the standard of care guideline for treating or preventing coronavirus infection or a related condition.

[0342] In some embodiments, the anti-coronavirus antigen antibody titer produced in a subject administered an effective amount of an immunizing composition is equivalent to an anti-coronavirus antigen antibody titer produced in a control subject administered a standard of care dose of a recombinant or purified protein vaccine, or a live attenuated or inactivated vaccine, or a VLP vaccine.

[0343] Vaccine efficacy may be assessed using standard analyses (see, e.g., Weinberg et al., J Infect Dis. 2010 June 1; 201(11):1607-10). For example, vaccine efficacy may be measured by double-blind, randomized, clinical controlled trials. Vaccine efficacy may be expressed as a proportionate reduction in disease attack rate (AR) between the unvaccinated (ARU) and vaccinated (ARV) study cohorts and can be calculated from the relative risk (RR) of disease among the vaccinated group with use of the following formulas:

Efficacy=(ARU−ARV)/ARU×100; and

Efficacy=(1−RR)×100.

[0344] Likewise, vaccine effectiveness may be assessed using standard analyses (see, e.g., Weinberg et al., J Infect Dis. 2010 June 1; 201(11):1607-10). Vaccine effectiveness is an assessment of how a vaccine (which may have already proven to have high vaccine efficacy) reduces disease in a population. This measure can assess the net balance of benefits and adverse effects of a vaccination program, not just the vaccine itself, under natural field conditions rather than in a controlled clinical trial. Vaccine effectiveness is proportional to vaccine efficacy (potency) but is also affected by how well target groups in the population are immunized, as well as by other non-vaccine-related factors that influence the ‘real-world’ outcomes of hospitalizations, ambulatory visits, or costs. For example, a retrospective case control analysis may be used, in which the rates of vaccination among a set of infected cases and appropriate controls are compared. Vaccine effectiveness may be expressed as a rate difference, with use of the odds ratio (OR) for developing infection despite vaccination:

Effectiveness=(1−OR)×100.

[0345] In some embodiments, efficacy of the immunizing composition (e.g., RNA vaccine) is at least 60% relative to unvaccinated control subjects. For example, efficacy of the immunizing composition may be at least 65%, at least 70%, at least 75%, at least 80%, at least 85%, at least 95%, at least 98%, or 100% relative to unvaccinated control subjects.

[0346] Sterilizing Immunity. Sterilizing immunity refers to a unique immune status that prevents effective pathogen infection into the host. In some embodiments, the effective amount of an immunizing composition of the present disclosure is sufficient to provide sterilizing immunity in the subject for at least 1 year. For example, the effective amount of an immunizing composition of the present disclosure is sufficient to provide sterilizing immunity in the subject for at least 2 years, at least 3 years, at least 4 years, or at least 5 years. In some embodiments, the effective amount of an immunizing composition of the present disclosure is sufficient to provide sterilizing immunity in the subject at an at least 5-fold lower dose relative to control. For example, the effective amount may be sufficient to provide sterilizing immunity in the subject at an at least 10-fold lower, 15-fold, or 20-fold lower dose relative to a control.

[0347] Detectable Antigen. In some embodiments, the effective amount of an immunizing composition of the present disclosure is sufficient to produce detectable levels of coronavirus antigen as measured in serum of the subject at 1-72 hours post administration.

[0348] Titer. An antibody titer is a measurement of the amount of antibodies within a subject, for example, antibodies that are specific to a particular antigen (e.g., an anti-coronavirus antigen). Antibody titer is typically expressed as the inverse of the greatest dilution that provides a positive result. Enzyme-linked immunosorbent assay (ELISA) is a common assay for determining antibody titers, for example.

[0349] In some embodiments, the effective amount of an immunizing composition of the present disclosure is sufficient to produce a 1,000-10,000 neutralizing antibody titer produced by neutralizing antibody against the coronavirus antigen as measured in serum of the subject at 1-72 hours post administration. In some embodiments, the effective amount is sufficient to produce a 1,000-5,000 neutralizing antibody titer produced by neutralizing antibody against the coronavirus antigen as measured in serum of the subject at 1-72 hours post administration. In some embodiments, the effective amount is sufficient to produce a 5,000-10,000 neutralizing antibody titer produced by neutralizing antibody against the coronavirus antigen as measured in serum of the subject at 1-72 hours post administration.

[0350] In some embodiments, the neutralizing antibody titer is at least 100 NT50. For example, the neutralizing antibody titer may be at least 200, 300, 400, 500, 600, 700, 800, 900 or 1000 NT50. In some embodiments, the neutralizing antibody titer is at least 10,000 NT50.

[0351] In some embodiments, the neutralizing antibody titer is at least 100 neutralizing units per milliliter (NU/mL). For example, the neutralizing antibody titer may be at least 200, 300, 400, 500, 600, 700, 800, 900 or 1000 NU/mL. In some embodiments, the neutralizing antibody titer is at least 10,000 NU/mL.

[0352] In some embodiments, an anti-coronavirus antigen antibody titer produced in the subject is increased by at least 1 log relative to a control. For example, an anti-coronavirus antigen antibody titer produced in the subject may be increased by at least 2, 3, 4, 5, 6, 7, 8, 9 or 10 log relative to a control.

[0353] In some embodiments, an anti-coronavirus antigen antibody titer produced in the subject is increased at least 2 times relative to a control. For example, an anti-coronavirus antigen antibody titer produced in the subject is increased by at least 3, 4, 5, 6, 7, 8, 9 or 10 times relative to a control.

[0354] In some embodiments, a geometric mean, which is the nth root of the product of n numbers, is generally used to describe proportional growth. Geometric mean, in some embodiments, is used to characterize antibody titer produced in a subject.

[0355] A control may be, for example, an unvaccinated subject, or a subject administered a live attenuated viral vaccine, an inactivated viral vaccine, or a protein subunit vaccine.

### EXAMPLES

### Example 1: nCoV In Vitro Expression—DNA

[0356] The constructs tested in this experiment were Norwood's DNA co-transfected with a T7 polymerase plasmid to transactivate the promoter on the 2019-nCoV plasmid from Norwood. SARS was used a positive control DNA. The assay conditions were as follows: DNA constructs: SARS-CoV-2 Variants 6-10

[0357] Cell type: HEK293T Cells

[0358] Plate format: 12-well @ 600,000 cells/well

[0359] DNA per well: 2.5 μg/well (construct: T7=1:1)

[0360] Incubation time: 24, 72 hour

[0361] Extracellular staining: single color

[0362] Instrument: LSR Fortessa

[0363] ACE2-FLAG, His: 200 μg stock, 10 μg/ml FACS concentration

[0364] Anti-FLAG-FITC: 1 mg, 5 μg/ml FACS concentration

### Example 2: nCoV In Vitro Expression—mRNA

[0365] mRNA of the constructs in Example 1 were tested. The assay conditions were as follows:

[0366] mRNA constructs: SARS-CoV-2 Variants 6-10

[0367] Cell type: HEK293T Cells

[0368] Plate format: 24-well @ 300,000 cells/well

[0369] mRNA per well: 0.5 μg, 0.1 μg/well

[0370] Incubation time: 24, 48 hour

[0371] Extracellular staining: single color

[0372] Instrument: LSR Fortessa

[0373] ACE2-FLAG, His: 200 μg stock, 10 μg/ml FACS concentration

[0374] Anti-FLAG-FITC: 1 mg, 5 μg/ml FACS concentration

[0375] Among all the constructs, SARS-CoV-2 Variant 5 showed best expression as compared with others at low dose. See FIGS. 2 and 3.

### Example 3: Immunogenicity Study

[0376] The instant study is designed to test the immunogenicity in mice and/or rabbits of the candidate coronavirus vaccines comprising an mRNA of Table 1 encoding a coronavirus antigen (e.g., the spike (S) protein, the S1 subunit (S1) of the spike protein, or the S2 subunit (S2) of the spike protein), such as a SARS-CoV-2 antigen.

[0377] Animals are vaccinated on week 0 and 3 via intravenous (IV), intramuscular (IM), or intradermal (ID) routes. As controls, one group remains unvaccinated and one is administered inactivated coronavirus. Serum is collected from each animal on weeks 1, 3 (pre-dose) and 5. Individual bleeds are tested for anti-S, anti-S1 or anti-Ω activity via a virus neutralization assay from all three time points, and pooled samples from week 5 only are tested by Western blot using inactivated coronavirus.

[0378] In experiments where a lipid nanoparticle (LNP) formulation is used, the formulation may include 0.5-15% PEG-modified lipid; 5-25% non-cationic lipid; 25-55% sterol; and 20-60% ionizable cationic lipid. The PEG-modified lipid may be 1,2 dimyristoyl-sn-glycerol, methoxypolyethyleneglycol (PEG2000 DMG), the non-cationic lipid may be 1,2 distearoyl-sn-glycero-3-phosphocholine (DSPC), the sterol may be cholesterol; and the ionizable cationic lipid may have the structure of Compound 1, for example.

### Example 4: Coronavirus Challenge

[0379] The instant study is designed to test the efficacy in mice and/or rabbits of candidate coronavirus vaccines comprising an mRNA of Table 1 encoding a coronavirus antigen (e.g., the spike (S) protein, the S1 subunit (S1) of the spike protein, or the S2 subunit (S2) of the spike protein), such as a SARS-CoV-2 antigen, against a lethal challenge with a coronavirus. Animals are challenged with a lethal dose (10×LD90; ˜100 plaque-forming units; PFU) of coronavirus.

[0380] The animals used are 6-8 week old female animals in groups of 10. Animals are vaccinated on weeks 0 and 3 via an IM, ID or IV route of administration. Candidate vaccines are chemically modified or unmodified. Animal serum is tested for microneutralization (see Example 14). Animals are then challenged with ˜1 LD90 of coronavirus on week 7 via an IN, IM, ID or IV route of administration. Endpoint is day 13 post infection, death or euthanasia. Animals displaying severe illness as determined by >30% weight loss, extreme lethargy or paralysis are euthanized. Body temperature and weight are assessed and recorded daily.

### Example 5—Immunogenicity of SARS-CoV-2 Variant 9 in Mice (One Dose)

[0381] C3B6, C57/BL6, and BALB/c mice were immunized with various doses of the SARS-CoV-2 Variant 9 mRNA vaccine (“Variant 9”) in 50 μL of 1×PBS injected intramuscularly into the right hind leg. Two weeks post-immunization, sera were collected and subjected to ELISA to assess antibody binding to SARS-CoV-2 stabilized prefusion spike protein (SARS-CoV-2 pre-S).

[0382] The data for Variant 9 is shown in FIGS. 4A-4B. There were no significant differences between the mouse strains. As shown in FIG. 4A, the C3B6 mice that received 1 μg of Variant 9 had significantly higher antibody responses than the C3B6 mice that received 0.1 μg or 0.01 μg doses (p-value <0.05). FIG. 4B shows that BALB/c mice that received 10 μg of Variant 9 had significantly higher antibody responses than BALB/c mice that received the 1 μg dose (p-value <0.05) or the 0.1 μg dose (p-value <0.0001).

[0383] Other mRNA candidates were tested in the manner described above, as shown in FIGS. 5A-5C. FIG. 5A demonstrates that SARS-CoV-2 Variant 5 mRNA vaccine (“Variant 5”) elicited similar antibody responses in C3B6 and BALB/c mice following administration of one dose. BALB/c mice that received 1 μg of Variant 9 or Variant 5 had significantly higher antibody responses as compared to BALB/c mice that received 0.1 μg or 0.01 μg doses (p-value <0.05) (FIG. 5B). At 0.1 μg, Variant 9 elicited similar responses to various other SARS-CoV-2 vaccine antigens delivered by mRNA. Also, at the 0.1 μg dose, SARS-CoV-2 Variant 8 mRNA vaccine (“Variant 8”) and SARS-CoV-2 Variant 6 mRNA vaccine (“Variant 6”) elicited significantly higher antibody responses than soluble spike protein (S) sequences (*=p-value <0.05; **=p-value <0.01).

### Temporal Analysis

[0384] BALB/c mice were immunized with various doses of Variant 9 manufactured by the clinically-representative process in 50 μL of 1×PBS intramuscularly into the right hind leg. Every two weeks, post-prime sera were collected and subjected to ELISA to assess antibody binding to SARS-CoV-2 stabilized prefusion spike protein (SARS-CoV-2 pre-S). The results are shown in FIG. 6. Each symbol represents the geometric mean titer (GMT) and error bars indicate the geometric standard deviation (SD). Two-way ANOVA was used to compare antibody responses over time and each dose. The 10 μg dose of Variant 9 was found to elicit a significantly higher antibody response than all other doses (p-value <0.0001) and significantly decays over 4 weeks after prime (p-value <0.001).

### Example 6—Immunogenicity of Variant 9 in Mice (Two Doses)

### Comparison of Mouse Strains

[0385] Mice (BALB/c, C57BL/6, and C3B6) were immunized with various doses of Variant 9 in 50 μL of 1×PBS intramuscularly into the right hind leg at weeks 0 and 3 (FIG. 7). Two weeks post-prime and post-boost (e.g. weeks 2 and 5), sera were collected and subjected to ELISA to assess antibody binding to SARS-CoV-2 stabilized prefusion spike protein (SARS-CoV-2 pre-S).

[0386] The results are shown in FIGS. 8A-8C. Each symbol represents an individual mouse, bars represent geometric mean titers (GMT), and error bars indicate the geometric standard deviation (SD). Two-way ANOVA was used to compare post-prime and post-boost responses. At the 1 dose, the BALB/c (FIG. 8A) and C57/BL6 (FIG. 8B) mice immunized with Variant 9 had significantly higher antibody responses following boost (p-value <0.0001).

Comparison of SARS-CoV-2 mRNA Vaccine Constructs

[0387] Mice (BALB/c and C3B6) were immunized with various doses of Variant 9, Variant 5, or SARS-CoV-2 wild-type spike protein mRNA in 50 μL of 1×PBS intramuscularly into the right hind leg at weeks 0 and 3 (FIG. 7). Two weeks post-prime and post-boost (e.g. weeks 2 and 5), sera were collected and subjected to ELISA to assess antibody binding to SARS-CoV-2 stabilized prefusion spike protein (SARS-CoV-2 pre-S).

[0388] The results are shown in FIGS. 9A-9E. Each symbol represents an individual mouse, bars represent geometric mean titers (GMT), and error bars indicate the geometric standard deviation (SD). Two-way ANOVA was used to compare post-prime and post-boost responses. At the 1 dose, mice immunized with Variant 5 and the spike wild-type sequence (S WT) had significantly higher antibody responses post-boost (p-value <0.0001) (FIGS. 9A-9C). Also, at the 1 μg dose, the BALB/c mice immunized with Variant 9 had significantly higher antibody responses than mice immunized with the GMP backup sequence (p-value <0.01) and the S WT (p-value <0.05) (FIG. 9D). There was no significant difference between antibody responses elicited by either construct in the C3B6 mice (FIG. 9E). For all three sequences tested, there was a significant temporal response (e.g., post-prime dose vs. post-boost dose).

[0389] Further research sequences were assayed. BALB/c mice were immunized with various doses of mRNA encoding Variant 9 or other research sequences in 504, of 1×PBS intramuscularly into the right hind leg at weeks 0 and 3 (FIG. 7). Two weeks post-boost (e.g. week 5), sera were collected and subjected to ELISA to assess antibody binding to SARS-CoV-2 stabilized prefusion spike protein (SARS-CoV-2 pre-S).

[0390] The results are shown in FIG. 10. Each symbol represents an individual mouse, bars represent geometric mean titers (GMT), and error bars indicate the geometric standard deviation (SD). A one-way ANOVA was used to compare all immunogens. Mice immunized with Variant 8, Variant 7, and Variant 6 had significantly higher antibody titers than mice immunized with Variant 9 and S WT (*=p-value <0.05; **=p-value <0.01; ****=p-value <0.0001).

### Example 7—In Vivo Expression of SARS-CoV-2 mRNA Vaccine Constructs

[0391] Female BALB/c mice, 6-8 weeks of age, were administered either 2 μg or 10 μg of a COVID-19 construct or Tris buffer (as a control) intramuscularly in each hind leg. The constructs comprise Variant 9 in cationic lipid nanoparticles, 10.7 mM sodium acetate, 8.7% sucrose, 20 mM Tris (pH 7.5). Three constructs were tested: Variant 9, Variant 5, and Variant 6. The constructs were stored at −70° C. (Variant 9) or −20° C. (other constructs). One day later, spleens and lymph nodes were collected to detect protein expression using flow cytometry.

[0392] FIGS. 11A-11B show the results using the 5653-118 (“118”) antibody, which is specific for the N-terminal domain of SARS-CoV-1 S1 subunit. There was good expression from all the constructs tested, and a dose-dependent drop in expression was observed. In the lymph node (FIG. 11A) and in the spleen (FIG. 11B), Variant 5 showed significantly higher expression (α=0.05) than either of the other constructs. At the lower dose (2 μg), Variant 9 had significantly higher expression (α=0.05) than Variant 6.

[0393] FIGS. 12A-12B shows the results using the 5652-109 (“109”) antibody, which is specific for the receptor-binding domain of SARS-CoV-1 S protein. There was good expression from all the constructs tested, and a dose-dependent drop in expression was observed. There was no significant difference between Variant 9 and Variant 5 at the 10 μg dose in the lymph node or the spleen. At the 2 μg dose, Variant 9 had significantly higher expression (α=0.05) than the other two constructs in the lymph node (FIG. 12A) and in the spleen (FIG. 12B).

### Example 8—In Vitro Expression of SARS-CoV-2 mRNA Vaccine Constructs

[0394] Six SARS-CoV-2 mRNA vaccine constructs were tested in vitro. HEK293t cells were plated (30,000 cells/well) on a 96-well plate. 200 ng of the construct was added to each well and the plates were incubated for 24 hours. Then, the cells were stained with the “118” antibody (at dilutions of 1:100, 1:300, or 1:600), the “109” antibody (at dilutions of 1:100, 1:300, or 1:600), or SARS-103 (binds RBD from SARS-CoV-1 at a dilution of 1:100; as a control). Staining was then performed with anti-human FC AL647, at a dilution of 1:500, and the samples were read using the LSR Fortessa. The results are shown in FIGS. 13A-13C. The results of Variant 9 are provided in FIG. 14.

### Example 9—In Vitro Potency Assay Development

[0395] An assay was developed to examine the potency of different constructs. Two antibodies, 118 (specific for the N-terminal domain of SARS-CoV-1 S1 subunit) and 109 (specific for the receptor-binding domain of SARS-CoV-1 S protein) were tested. As shown in FIG. 15, only the 118 antibody bound SARS-CoV-2 antigen at different concentrations and doses.

### Example 10—SARS-CoV-2 Variant 9 mRNA Vaccine Mouse Immunogenicity Study

[0396] Studies were initiated to evaluate immunogenicity and efficacy of low doses of SARS-CoV-2 Variant 9 mRNA vaccine (“Variant 9”) in BALB/c mice. BALB/c mice were vaccinated with 1 μg, 0.1 μg or 0.01 μg of Variant 9 at weeks 0 and 3. Binding antibodies to the stabilized S-2P protein were quantified at weeks 2 and 5. Two weeks after a single dose, there were substantial levels of binding antibodies to the S-2P protein measured by ELISA in mice that received 1 μg of Variant 9 (FIG. 16A). A second dose of Variant 9 significantly increased the level of binding antibodies in mice receiving 1 μg or 0.1 μg of Variant 9 (FIG. 16A). Neutralizing activity against SARS-CoV-2 was assessed using a pseudotyped lentivirus reporter neutralization assay. Variant 9 elicited significant neutralizing activity at the 1 μg dose compared to mice that received 0.1 μg of Variant 9 (FIG. 16B).

[0397] BALB/c mice were immunized with 1 or 0.1 μg of Variant 9, Variant 5, or wild type (WT) without the 2 proline mutation at weeks 0 and 3. Two weeks post-boost, sera were collected and analyzed by pseudotyped lentivirus reporter neutralization assays against homologous SARS-CoV-2. Sigmoidal curves, taking averages of triplicates at each serum dilution, were generated from relative luciferase units (RLU) readings, and 50% (IC₅₀) (FIGS. 21A, 21C, 21E, 21G) and 80% (IC₈₀) (FIGS. 21B, 21D, 21F, 21H) neutralizing activity was calculated considering uninfected cells to represent 100% neutralization and cells transduced with only virus to represent 0% neutralization. As shown FIGS. 21A-21F, mice immunized with 1 μg of SARS-CoV-2 S mRNA had significantly higher neutralizing antibody responses than mice immunized with 0.1 (***=p-value <0.001, ****=p-value <0.0001). Further, mice immunized with 0.1 μg dose did not have detectable neutralizing activity, suggesting sub-protective antibody levels. Also, stabilized SARS-CoV-2 S with 2P mutation (Variant 5 and Variant 9) induced more potent IC₅₀ neutralizing activity than WT S (*p-value <0.05). Inclusion of the native S1/S2 furin cleavage site or replacing the furin cleavage site with a GS linker to produce a single-chain construct did not have significant effect on immunogenicity (FIGS. 21G, 21H).

[0398] BALB/c mice immunized with 1 μg, 0.1 μg, or 0.01 μg of Variant 9 at weeks 0 and 3 in 50 μL of 1×PBS intramuscularly into the right hind leg and challenged at week 9 intranasally with 1×10⁵ PFU of a mouse-adapted SARS-CoV-2 which contains two targeted amino acid changes in the receptor-binding domain to remove clashes with the mouse ACE-2 receptor (see FIG. 19 for schedule). On day 2 post-challenge, mouse lungs and noses were homogenized and assess for viral load by plaque assays. The plaque-forming units in one lobe of lung (FIG. 17A) and in nasal turbinates (FIG. 17B) show the 1 μg dose group is fully protected with 60-fold reduction in titer compared to the control group. In contrast, unimmunized challenged mice had viral loads of about 10⁶ PFU per lung lobe. A dose effect was observed: the 0.1 μg Variant 9 dose reduced lung viral load by approximately 2 logs and the 0.01 μg Variant 9 dose reduced lung viral load by approximately 0.5 log.

[0399] In a further study, mice were vaccinated with 10 μg, μg, or 0.1 μg of Variant 9 in 50 μL of 1×PBS intramuscularly into the right hind leg one time (week 0) and were challenged intranasally at week 7 with 1×10⁵ PFU of a mouse-adapted SARS-CoV-2 which contains two targeted amino acid changes in the receptor-binding domain to remove clashes with the mouse ACE-2 receptor. On day 2 post-challenge, mouse lungs (FIG. 18A) and noses (FIG. 18B) were homogenized and assessed for viral load by plaque assay. As seen in FIG. 18A, the 10 μg dose and the 1 μg dose groups are fully protected from viral replication in the lung following challenge, with a 60-fold reduction in titer compared to the control group. Percent body weight is shown in FIG. 18C.

[0400] In an additional study, mice were vaccinated with 1 μg, 0.1 μg, or 0.01 μg of Variant 9 at weeks 0 and 4 and challenged at week 7 with a mouse-adapted SARS-CoV-2 which contains two targeted amino acid changes in the receptor-binding domain to remove clashes with the mouse ACE-2 receptor. Plaque-forming units in one lobe of lung (FIG. 20A) and in nasal turbinates (FIG. 20B) and at day two post-challenge show that the 1 μg dose group and the 0.1 μg dose group are fully protected, with approximately a 60-fold reduction in titer compared to the control group. Percent body weight is shown in FIG. 20C.

### Example 11—SARS-CoV-2 Variant 9 mRNA Vaccine Compare to Alternative Sequences

[0401] This Example provides data relating to binding and neutralizing antibody responses following low dose mRNA immunization with alternative spike antigen designs. BALB/c mice were immunized with 0.1 μg of mRNA encoding different SARS-CoV-2 S-2P variants. Mice were immunized twice at weeks 0 and 3. Two weeks post-boost, sera were collected and analyzed by fold-on competed ELISA against homologous SARS-CoV-2 stabilized spike (FIG. 22A) and pseudotyped lentivirus reporter neutralization assays (FIG. 22B). FIG. 22A shows serum endpoint binding titers, found by taking averages of duplicates of each serum dilution, and calculated as 4-fold above background optical density. Further, sigmoidal curves, taking averages of triplicates at each serum dilution, were generated from relative luciferase units (RLU) readings an 50% (IC₅₀) neutralizing activity was calculated considering uninfected cells representing 100% neutralization and cells transduced with only virus representing 0% neutralization (FIG. 22B). In addition, antibody binding and neutralization titers were compared by Spearman correlation (FIG. 22C). It was found that the mRNA encoding sequences containing cytoplasmic tail mutations elicited the most potent antibody responses. Additionally, there was a strong correlation between binding antibody titers and neutralizing antibody titers, where applicable.

### Methods

### SARS-CoV-2 ELISA

[0402] To measure antibody binding, an ELISA was performed. SARS-CoV-2 pre-S was coated onto 96-well Nunc MaxiSorp™ flat-bottom plates (ThermoFisher, catalog #: 44-2401-21) in 100 μL of 1×PBS for 16 hours at 4° C. Plates were washed 3 times with 250 μL PBS-Tween (PBST) (Medicago AB, catalog #: 09-9410-100). To prevent non-specific binding, plates were blocked with 200 μL PBST supplemented with 5% nonfat skim milk (BD Difco™, catalog #: 232100) (blocking buffer) for 1 hour at room temperature (RT). Plates were washed 3 times with 250 μL PBST. Sera were serially diluted (1:100, 4-fold, 8 times) in 100 μL blocking buffer and allowed to bind to antigen for 1 hour at RT, in duplicate. Plates were washed 3 times with 250 μL PBST. 100 mL goat anti-mouse IgG (H+L) cross-adsorbed secondary antibody conjugated to HRP (ThermoFisher, catolog #: G-21040) diluted in blocking buffer was added for 1 hour at RT. Plates were washed 3 times with 250 μL PBST. The enzyme-linked reaction was developed for 10 minutes with 100 μL KPL SureBlue 1-component TMB microwell peroxidase substrate (Sure Blue, catalog #: 5120-0077) and stopped with 100 μL 1N sulfuric acid (ThermoFisher, catolog #: SA 212-1). Spectramax Paradigm (Molecular Devices) was used to detect OD₄₅₀ Sera endpoint titers were calculated as 4-fold above non-specific secondary antibody binding to antigen.

### Additional Embodiments

[0403] 1. A ribonucleic acid (RNA) comprising an open reading frame (ORF) that encodes a coronavirus antigen capable of inducing an immune response, such as a neutralizing antibody response, to SARS-CoV-2, optionally wherein the RNA is formulated in a lipid nanoparticle.
2. A chemically modified ribonucleic acid (RNA) comprising an open reading frame (ORF) that comprises a sequence having at least 80% identity to a wild-type RNA encoding a SARS-CoV-2 antigen, optionally wherein the RNA is formulated in a lipid nanoparticle.
3. A codon-optimized ribonucleic acid (RNA) comprising an open reading frame (ORF) that comprises a sequence having at least 80% identity to a wild-type RNA encoding a SARS-CoV-2 antigen, optionally wherein the RNA is formulated in a lipid nanoparticle.
4. The RNA of paragraph 2 or 3, wherein the SARS-CoV-2 antigen encoded by the wild-type RNA comprises the sequence of SEQ ID NO: 31.
5. A ribonucleic acid (RNA) comprising an open reading frame (ORF) that comprises a sequence having at least 80% identity to the sequence of any one of SEQ ID NOs: 3, 7, 10, 13, 16, 19, 22, 25, 28, 31, 48, 50, 52, 54, 56, 61, 62, 64, 66, 68, 70, 72, 74, 76, 78, 80, 82, or 84.
6. The RNA of paragraph 5, wherein the ORF comprises a sequence having at least 85%, at least 90%, at least 95%, or at least 98% identity to the sequence of any one of SEQ ID NOs: 3, 7, 10, 13, 16, 19, 22, 25, 28, 31, 48, 50, 52, 54, 56, 61, 62, 64, 66, 68, 70, 72, 74, 76, 78, 80, 82, or 84.
7. The RNA of paragraph 5 or 6 further comprising a 5′ UTR, optionally wherein the 5′ UTR comprises the sequence of SEQ ID NO: 2 or SEQ ID NO: 36.
8. The RNA of any one of the preceding paragraphs further comprising a 3′ UTR, optionally wherein the 3′ UTR comprises the sequence of SEQ ID NO: 4 or SEQ ID NO: 37.
9. The RNA of any one of the preceding paragraphs further comprising a 5′ cap analog, optionally a 7mG(5′)ppp(5′)NlmpNp cap.
10. The RNA of any one of the preceding paragraphs further comprising a poly(A) tail, optionally having a length of 50 to 150 nucleotides.
11. The RNA of any one of paragraphs 5-10, wherein the ORF encodes a SARS-CoV-2 antigen.
12. The RNA of paragraph 11, wherein the coronavirus antigen is a structural protein.
13. The RNA of paragraph 12, wherein the structural protein is a spike protein.
14. The RNA of any one of paragraphs 11-13, wherein the coronavirus antigen comprises a sequence having at least 80% identity to the sequence of any one of SEQ ID NOs: 5, 8, 11, 14, 17, 20, 23, 26, 29, 32, 33, 34, 35, 47, 49, 59, 63, 65, 67, 69, 71, 73, 75, 77, 79, 81, 83, or 85.
15. The RNA of paragraph 14, wherein the coronavirus antigen comprises a sequence having at least 85%, at least 90%, at least 95%, or at least 98% identity to the sequence of any one of SEQ ID NOs: 5, 8, 11, 14, 17, 20, 23, 26, 29, 32, 33, 34, 35, 47, 49, 59, 63, 65, 67, 69, 71, 73, 75, 77, 79, 81, 83, or 85.
16. The RNA of any one of paragraphs 1-13, wherein the ORF comprises the sequence of any one of SEQ ID NOs: 3, 7, 10, 13, 16, 19, 22, 25, 28, 31, 48, 50, 52, 54, 56, 61, 62, 64, 66, 68, 70, 72, 74, 76, 78, 80, 82, or 84.
17. The RNA of any one of paragraphs 1-13, wherein the RNA comprises a sequence having at least 85%, at least 90%, at least 95%, or at least 98% identity to the sequence of any one of SEQ ID NOs: 1, 6, 9, 12, 15, 18, 21, 24, 27, 30, 51, 53, 55, 57-58, 60, or 86-97.
18. The RNA of any one of paragraphs 1-13, wherein the RNA comprises the sequence of any one of SEQ ID NOs: 1, 6, 9, 12, 15, 18, 21, 24, 27, 30, 51, 53, 55, 57-58, 60, or 86-97.
19. The RNA of any one of the preceding paragraphs, wherein the RNA comprises a chemical modification and optionally is fully chemically modified.
20. The RNA of paragraph 19, wherein the chemical modification is 1-methylpseudouridine and optionally each uridine is a 1-methylpseudouridine.
21. The RNA of paragraph 19, wherein each uridine is a 1-methylpseudouridine.
22. The RNA of any one of the preceding paragraphs formulated in a lipid nanoparticle.
23. The RNA of paragraph 22, wherein the lipid nanoparticle comprises a PEG-modified lipid, a non-cationic lipid, a sterol, an ionizable cationic lipid, or any combination thereof.
24. The RNA of paragraph 23, wherein the lipid nanoparticle comprises 0.5-15 mol % PEG-modified lipid; 5-25 mol % non-cationic lipid; 25-55 mol % sterol; and 20-60 mol % ionizable cationic lipid.
25. The RNA of paragraph 24, wherein the PEG-modified lipid is 1,2 dimyristoyl-sn-glycerol, methoxypolyethyleneglycol (PEG2000 DMG), the non-cationic lipid is 1,2 distearoyl-sn-glycero-3-phosphocholine (DSPC), the sterol is cholesterol; and the ionizable cationic lipid has the structure of Compound 1:

[chemical structure]

26. A composition comprising the RNA of any one of paragraphs 1-21 and a mixture of lipids.
27. The composition of paragraph 26, wherein the mixture of lipids comprises a PEG-modified lipid, a non-cationic lipid, a sterol, an ionizable cationic lipid, or any combination thereof.
28. The composition of paragraph 27, wherein the mixture of lipids comprises 0.5-15 mol % PEG-modified lipid; 5-25 mol % non-cationic lipid; 25-55 mol % sterol; and 20-60 mol % ionizable cationic lipid.
29. The composition of paragraph 28, wherein the PEG-modified lipid is 1,2 dimyristoyl-sn-glycerol, methoxypolyethyleneglycol (PEG2000 DMG), the non-cationic lipid is 1,2 distearoyl-sn-glycero-3-phosphocholine (DSPC), the sterol is cholesterol; and the ionizable cationic lipid has the structure of Compound 1:

[chemical structure]

30. The composition of any one of paragraphs 26-29, wherein the mixture of lipids forms lipid nanoparticles.
31. The composition of paragraph 30, wherein the RNA is formulated in the lipid nanoparticles.
32. The RNA of any one of paragraphs 1-13, wherein the ORF comprises a nucleotide sequence having at least 80%, at least 85%, at least 90%, at least 95%, at least 98%, or 100% identity to the sequence of SEQ ID NO: 28.
33. The RNA of any one of paragraphs 1-13, wherein the coronavirus antigen comprises an amino acid sequence having at least 80%, at least 85%, at least 90%, at least 95%, at least 98%, or 100% identity to the sequence of SEQ ID NO: 29.
33. The RNA of any one of paragraphs 1-13, wherein the RNA comprises a nucleotide sequence having at least 85%, at least 90%, at least 95%, at least 98%, or 100% identity to the sequence of SEQ ID NO: 27.
34. A method comprising administering to a subject the RNA or composition of any one of the preceding paragraphs in an amount effective to induce a neutralizing antibody response against a coronavirus in the subject.
35. A method comprising administering to a subject the RNA or composition of any one of the preceding paragraphs in an amount effective to induce a neutralizing antibody response and/or a T cell immune response, optionally a CD4⁺ and/or a CD8⁺ T cell immune response against a coronavirus in the subject.
36. The method of paragraph 34 and 35, wherein the coronavirus is a SARS-CoV-2.
37. The method of any one of the preceding method paragraphs, wherein the subject is immunocompromised.
38. The method of any one of the preceding method paragraphs, wherein the subject has a pulmonary disease.
39. The method of any one of the preceding method paragraphs, wherein the subject is 5 years of age or younger, or 65 years of age or older.
40. The method of any one of the preceding method paragraphs, comprising administering to the subject at least two doses of the composition.
41. The method of any one of the preceding method paragraphs, wherein detectable levels of the coronavirus antigen are produced in serum of the subject at 1-72 hours post administration of the RNA or composition comprising the RNA.
42. The method of any one of the preceding method paragraphs, wherein a neutralizing antibody titer of at least 100 NU/ml, at least 500 NU/ml, or at least 1000 NU/ml is produced in the serum of the subject at 1-72 hours post administration of the RNA or composition comprising the RNA.
43. An immunizing composition comprising: a lipid nanoparticle comprising (a) a messenger RNA that comprises an open reading frame (ORF) having at least 90%, at least 95%, at least 98% or 100% identity to the sequence of SEQ ID NO: 28 and (b) a mixture of lipids comprising 0.5-15 mol % PEG-modified lipid, 5-25 mol % non-cationic lipid, 25-55 mol % sterol, and 20-60 mol % ionizable cationic lipid.
44. An immunizing composition comprising: a lipid nanoparticle comprising (a) a messenger RNA that comprises a sequence having at least 90%, at least 95%, at least 98% or 100% identity to the sequence of SEQ ID NO: 27 and (b) a mixture of lipids comprising 0.5-15 mol % PEG-modified lipid, 5-25 mol % non-cationic lipid, 25-55 mol % sterol, and 20-60 mol % ionizable cationic lipid.
45. An immunizing composition comprising:

[0404] (a) a first ribonucleic acid (RNA) comprising an open reading frame (ORF) that encodes a coronavirus antigen capable of inducing an immune response, such as a neutralizing antibody response, to a SARS-CoV-2; and

[0405] (b) a second ribonucleic acid (RNA) comprising an open reading frame (ORF) that encodes a coronavirus antigen capable of inducing an immune response, such as a neutralizing antibody response, to a SARS-CoV-2, wherein the ORF of the first RNA is different from the ORF of the second RNA.

46. The immunizing composition of paragraph 45 further comprising a lipid nanoparticle that comprises a mixture of lipids.
47. The immunizing composition of paragraph 46, wherein the mixture of lipids comprises a PEG-modified lipid, a non-cationic lipid, a sterol, an ionizable cationic lipid, or any combination thereof.
48. The immunizing composition of paragraph 47, wherein the mixture of lipids comprises 0.5-15 mol % PEG-modified lipid; 5-25 mol % non-cationic lipid; 25-55 mol % sterol; and 20-60 mol % ionizable cationic lipid.
49. The immunizing composition of paragraph 46 or 47, wherein the PEG-modified lipid is 1,2 dimyristoyl-sn-glycerol, methoxypolyethyleneglycol (PEG2000 DMG), the non-cationic lipid is 1,2 distearoyl-sn-glycero-3-phosphocholine (DSPC), the sterol is cholesterol, and the ionizable cationic lipid has the structure of Compound 1:

[chemical structure]

50. The immunizing composition of any one of paragraphs 45-49, wherein coronavirus antigen encoded by the ORF of the first RNA comprises an amino acid sequence having at least 80%, at least 85%, at least 90%, or at least 95% identity to the amino acid sequence of any one of SEQ ID NOs: 5, 8, 11, 14, 17, 20, 23, 26, 29, 32, 33, 34, 35, 47, 49, 59, 63, 65, 67, 69, 71, 73, 75, 77, 79, 81, 83, and 85.
51. The immunizing composition of any one of paragraphs 45-49, wherein the ORF of the first RNA comprises a nucleotide sequence having at least 80%, at least 85%, at least 90%, or at least 95% identity to the amino acid sequence of any one of SEQ ID NOs: 3, 7, 10, 13, 16, 19, 22, 25, 28, 31, 48, 50, 52, 54, 56, 61, 62, 64, 66, 68, 70, 72, 74, 76, 78, 80, 82, and 84.
52. The RNA of any one of paragraphs 1-13, wherein the ORF encodes a SARS-CoV-2 antigen.
53. The RNA of paragraph 52, wherein the SARS-CoV-2 antigen is a structural protein.
54. The RNA of paragraph 53, wherein the structural protein is selected from the group consisting of: a spike (S) protein, a membrane (M) protein, an envelope (E) protein, and a (NC) nucleocapsid protein.
55. The RNA of paragraph 54, wherein the structural protein is an S protein, optionally a stabilized prefusion form of an S protein.
56. The RNA of paragraph 55, wherein the S protein is an S protein variant, relative to an S protein comprising the amino acid sequence of SEQ ID NO: 32.
57. The RNA of paragraph 56, wherein the S protein variant comprises a reversion of a polybasic cleavage site to a single basic cleavage site.
58. The RNA of paragraph 56, wherein the S protein variant comprises a deletion of a polybasic ER/Golgi signal sequence (KXHXX-COOH) at the carboxy tail of the S protein variant.
59. The RNA of paragraph 57-58, wherein the S protein comprises a double proline stabilizing mutation.
60. The RNA of paragraph 57-58, wherein the S protein comprises a modified protease cleavage site to stabilize the protein.
61. The RNA of paragraph 57-60, wherein the S protein comprises a deletion of the cytoplasmic tail.
62. The RNA of paragraph 57-61, wherein the S protein comprises a foldon scaffold.
63. The RNA of paragraph 57, wherein the S protein comprises a sequence having at least 80% identity to the sequence of any one of SEQ ID NOs: 5, 8, 11, 14, 17, 20, 23, 26, 29, 32, 33, 34, 35, 47, 49, 59, 63, 65, 67, 69, 71, 73, 75, 77, 79, 81, 83, or 85.
64. The RNA of paragraph 58, wherein the structural protein is an M protein.
65. The RNA of paragraph 64, wherein the M protein comprise a sequence having at least 80% identity to the sequence of SEQ ID NO: 81.
66. The RNA of paragraph 65, wherein the M protein comprises a sequence having at least 85%, at least 90%, at least 95%, or at least 98% identity to the sequence of SEQ ID NO: 81.
67. The RNA of any one of paragraph 57-66, wherein the ORF comprises the sequence of SEQ ID NO: 80.
68. The RNA of any one of paragraph 57-67, wherein the RNA comprises a sequence having at least 85%, at least 90%, at least 95%, or at least 98% identity to the sequence of SEQ ID NO: 95.
69. The RNA of paragraph 68, wherein the RNA comprises the sequence of SEQ ID NO: 95.
70. The RNA of paragraph 54, wherein the structural protein is an E protein.
71. The RNA of paragraph 70, wherein the E protein comprises a sequence having at least 80% identity to the sequence of SEQ ID NO: 83.
72. The RNA of paragraph 71, wherein the E protein comprises a sequence having at least 85%, at least 90%, at least 95%, or at least 98% identity to the sequence of SEQ ID NO: 83.
73. The RNA of any one of paragraph 70-72, wherein the ORF comprises the sequence of SEQ ID NO: 82.
74. The RNA of any one of paragraph 70-73, wherein the RNA comprises a sequence having at least 85%, at least 90%, at least 95%, or at least 98% identity to the sequence of SEQ ID NO: 96.
75. The RNA of paragraph 74, wherein the RNA comprises the sequence of SEQ ID NO: 96.
76. The RNA of paragraph 54, wherein the structural protein is an NC protein.
77. The RNA of paragraph 76, wherein the NC protein comprises a sequence having at least 80% identity to the sequence of SEQ ID NO: 85.
78. The RNA of paragraph 77, wherein the NC protein comprises a sequence having at least 85%, at least 90%, at least 95%, or at least 98% identity to the sequence of SEQ ID NO: 85.
79. The RNA of any one of paragraph 76-78, wherein the ORF comprises the sequence of SEQ ID NO: 84.
80. The RNA of any one of paragraph 76-78, wherein the RNA comprises a sequence having at least 85%, at least 90%, at least 95%, or at least 98% identity to the sequence of SEQ ID NO: 97.
81. The RNA of paragraph 80, wherein the RNA comprises the sequence of SEQ ID NO: 97.
82. The RNA of paragraph 53 wherein the SARS-CoV-2 antigen is a fusion protein.
83. The RNA of paragraph 82, wherein the fusion protein comprises a SARS-CoV-2 polypeptide and a polypeptide from a different virus.
84. A messenger ribonucleic acid (mRNA) comprising an open reading frame (ORF) that comprises a nucleotide sequence having at least 80% identity to the nucleotide sequence of SEQ ID NO 106.
85. A messenger ribonucleic acid (mRNA) comprising a nucleotide sequence having at least 80% identity to the nucleotide sequence of SEQ ID NO 105.
86. A messenger ribonucleic acid (mRNA) comprising an open reading frame (ORF) that comprises a nucleotide sequence having at least 95% identity to the nucleotide sequence of SEQ ID NO 106.
87 A messenger ribonucleic acid (mRNA) comprising a nucleotide sequence having at least 95% identity to the nucleotide sequence of SEQ ID NO 105.
88. A messenger ribonucleic acid (mRNA) comprising an open reading frame (ORF) that comprises a nucleotide sequence having at least 99% identity to the nucleotide sequence of SEQ ID NO 106.
89. A messenger ribonucleic acid (mRNA) comprising a nucleotide sequence having at least 99% identity to the nucleotide sequence of SEQ ID NO 105.

### SEQUENCE LISTING

[0406] It should be understood that any of the mRNA sequences described herein may include a 5′ UTR and/or a 3′ UTR. The UTR sequences may be selected from the following sequences, or other known UTR sequences may be used. It should also be understood that any of the mRNA constructs described herein may further comprise a poly(A) tail and/or cap (e.g., 7mG(5′)ppp(5′)NlmpNp). Further, while many of the mRNAs and encoded antigen sequences described herein include a signal peptide and/or a peptide tag (e.g., C-terminal His tag), it should be understood that the indicated signal peptide and/or peptide tag may be substituted for a different signal peptide and/or peptide tag, or the signal peptide and/or peptide tag may be omitted.

5′ UTR:
(SEQ ID NO: 36)
GGGAAAUAAGAGAGAAAAGAAGAGUAAGAAGAAAUAUAAGAGCCAC
5′ UTR:
(SEQ ID NO: 2)
GGGAAAUAAGAGAGAAAAGAAGAGUAAGAAGAAAUAUAAGACCCCGGCGC
CGCCACC
3′ UTR:
(SEQ ID NO: 37)
UGAUAAUAGGCUGGAGCCUCGGUGGCCAUGCUUCUUGCCCCUUGGGCCUC
CCCCCAGCCCCUCCUCCCCUUCCUGCACCCGUACCCCCGUGGUCUUUGAA
UAAAGUCUGAGUGGGCGGC
3′ UTR:
(SEQ ID NO: 4)
UGAUAAUAGGCUGGAGCCUCGGUGGCCUAGCUUCUUGCCCCUUGGGCCUC
CCCCCAGCCCCUCCUCCCCUUCCUGCACCCGUACCCCCGUGGUCUUUGAA
UAAAGUCUGAGUGGGCGGC

TABLE 1
SARS-CoV-2 Spike (S) Protein

| SEQ ID NO: 30 consists of from 5′ end to 3′ end: 5′ UTR SEQ ID NO: 2, mRNA ORF SEQ ID | | 30 |
|---|---|---|
| NO: 31, and 3′ UTR SEQ ID NO: 4. | | |
| Chemistry | 1-methylpseudouridine | |
| Cap | 7mG(5′)ppp(5′)NlmpNp | |
| 5′UTR | GGGAAAUAAGAGAGAAAAGAAGAGUAAGAAGAAAUAUA | 2 |
| | AGACCCCGGCGCCGCCACC | |
| ORF of mRNA | AUGUUCGUGUUCCUGGUGCUGCUGCCCCUGGUGAGCAGC | 31 |
| Construct | CAGUGCGUGAACCUGACCACCCGGACCCAGCUGCCACCAG | |
| (excluding the stop | CCUACACCAACAGCUUCACCCGGGGCGUCUACUACCCCGA | |
| codon) | CAAGGUGUUCCGGAGCAGCGUCCUGCACAGCACCCAGGA | |
| | CCUGUUCCUGCCCUUCUUCAGCAACGUGACCUGGUUCCAC | |
| | GCCAUCCACGUGAGCGGCACCAACGGCACCAAGCGGUUCG | |
| | ACAACCCCGUGCUGCCCUUCAACGACGGCGUGUACUUCGC | |
| | CAGCACCGAGAAGAGCAACAUCAUCCGGGGCUGGAUCUU | |
| | CGGCACCACCCUGGACAGCAAGACCCAGAGCCUGCUGAUC | |
| | GUGAAUAACGCCACCAACGUGGUGAUCAAGGUGUGCGAG | |
| | UUCCAGUUCUGCAACGACCCCUUCCUGGGCGUGUACUACC | |
| | ACAAGAACAACAAGAGCUGGAUGGAGAGCGAGUUCCGGG | |
| | UGUACAGCAGCGCCAACAACUGCACCUUCGAGUACGUGA | |
| | GCCAGCCCUUCCUGAUGGACCUGGAGGGCAAGCAGGGCA | |
| | ACUUCAAGAACCUGCGGGAGUUCGUGUUCAAGAACAUCG | |
| | ACGGCUACUUCAAGAUCUACAGCAAGCACACCCCAAUCA | |
| | ACCUGGUGCGGGAUCUGCCCCAGGGCUUCUCAGCCCUGG | |
| | AGCCCCUGGUGGACCUGCCCAUCGGCAUCAACAUCACCCG | |
| | GUUCCAGACCCUGCUGGCCCUGCACCGGAGCUACCUGACC | |
| | CCAGGCGACAGCAGCAGCGGGUGGACAGCAGGCGCGGCU | |
| | GCUUACUACGUGGGCUACCUGCAGCCCCGGACCUUCCUGC | |
| | UGAAGUACAACGAGAACGGCACCAUCACCGACGCCGUGG | |
| | ACUGCGCCCUGGACCCUCUGAGCGAGACCAAGUGCACCCU | |
| | GAAGAGCUUCACCGUGGAGAAGGGCAUCUACCAGACCAG | |
| | CAACUUCCGGGUGCAGCCCACCGAGAGCAUCGUGCGGUU | |
| | CCCCAACAUCACCAACCUGUGCCCCUUCGGCGAGGUGUUC | |
| | AACGCCACCCGGUUCGCCAGCGUGUACGCCUGGAACCGGA | |
| | AGCGGAUCAGCAACUGCGUGGCCGACUACAGCGUGCUGU | |
| | ACAACAGCGCCAGCUUCAGCACCUUCAAGUGCUACGGCG | |
| | UGAGCCCCACCAAGCUGAACGACCUGUGCUUCACCAACGU | |
| | GUACGCCGACAGCUUCGUGAUCCGUGGCGACGAGGUGCG | |
| | GCAGAUCGCACCCGGCCAGACAGGCAAGAUCGCCGACUAC | |
| | AACUACAAGCUGCCCGACGACUUCACCGGCUGCGUGAUC | |
| | GCCUGGAACAGCAACAACCUCGACAGCAAGGUGGGCGGC | |
| | AACUACAACUACCUGUACCGGCUGUUCCGGAAGAGCAAC | |
| | CUGAAGCCCUUCGAGCGGGACAUCAGCACCGAGAUCUAC | |
| | CAAGCCGGCUCCACCCCUUGCAACGGCGUGGAGGGCUUCA | |
| | ACUGCUACUUCCCUCUGCAGAGCUACGGCUUCCAGCCCAC | |
| | CAACGGCGUGGGCUACCAGCCCUACCGGGUGGUGGUGCU | |
| | GAGCUUCGAGCUGCUGCACGCCCCAGCCACCGUGUGUGGC | |
| | CCCAAGAAGAGCACCAACCUGGUGAAGAACAAGUGCGUG | |
| | AACUUCAACUUCAACGGCCUUACCGGCACCGGCGUGCUG | |
| | ACCGAGAGCAACAAGAAAUUCCUGCCCUUUCAGCAGUUC | |
| | GGCCGGGACAUCGCCGACACCACCGACGCUGUGCGGGAUC | |
| | CCCAGACCCUGGAGAUCCUGGACAUCACCCCUUGCAGCUU | |
| | CGGCGGCGUGAGCGUGAUCACCCCAGGCACCAACACCAGC | |
| | AACCAGGUGGCCGUGCUGUACCAGGACGUGAACUGCACC | |
| | GAGGUGCCCGUGGCCAUCCACGCCGACCAGCUGACACCCA | |
| | CCUGGCGGGUCUACAGCACCGGCAGCAACGUGUUCCAGA | |
| | CCCGGGCCGGUUGCCUGAUCGGCGCCGAGCACGUGAACA | |
| | ACAGCUACGAGUGCGACAUCCCCAUCGGCGCCGGCAUCUG | |
| | UGCCAGCUACCAGACCCAGACCAAUUCACCCCGGAGGGCA | |
| | AGGAGCGUGGCCAGCCAGAGCAUCAUCGCCUACACCAUG | |
| | AGCCUGGGCGCCGAGAACAGCGUGGCCUACAGCAACAAC | |
| | AGCAUCGCCAUCCCCACCAACUUCACCAUCAGCGUGACCA | |
| | CCGAGAUUCUGCCCGUGAGCAUGACCAAGACCAGCGUGG | |
| | ACUGCACCAUGUACAUCUGCGGCGACAGCACCGAGUGCA | |
| | GCAACCUGCUGCUGCAGUACGGCAGCUUCUGCACCCAGCU | |
| | GAACCGGGCCCUGACCGGCAUCGCCGUGGAGCAGGACAA | |
| | GAACACCCAGGAGGUGUUCGCCCAGGUGAAGCAGAUCUA | |
| | CAAGACCCCUCCCAUCAAGGACUUCGGCGGCUUCAACUUC | |
| | AGCCAGAUCCUGCCCGACCCCAGCAAGCCCAGCAAGCGGA | |
| | GCUUCAUCGAGGACCUGCUGUUCAACAAGGUGACCCUAG | |
| | CCGACGCCGGCUUCAUCAAGCAGUACGGCGACUGCCUCGG | |
| | CGACAUAGCCGCCCGGGACCUGAUCUGCGCCCAGAAGUUC | |
| | AACGGCCUGACCGUGCUGCCUCCCCUGCUGACCGACGAGA | |
| | UGAUCGCCCAGUACACCAGCGCCCUGUUAGCCGGAACCAU | |
| | CACCAGCGGCUGGACUUUCGGCGCUGGAGCCGCUCUGCA | |
| | GAUCCCCUUCGCCAUGCAGAUGGCCUACCGGUUCAACGGC | |
| | AUCGGCGUGACCCAGAACGUGCUGUACGAGAACCAGAAG | |
| | CUGAUCGCCAACCAGUUCAACAGCGCCAUCGGCAAGAUCC | |
| | AGGACAGCCUGAGCAGCACCGCUAGCGCCCUGGGCAAGC | |
| | UGCAGGACGUGGUGAACCAGAACGCCCAGGCCCUGAACA | |
| | CCCUGGUGAAGCAGCUGAGCAGCAACUUCGGCGCCAUCA | |
| | GCAGCGUGCUGAACGACAUCCUGAGCCGGCUGGACAAGG | |
| | UGGAGGCCGAGGUGCAGAUCGACCGGCUGAUCACUGGCC | |
| | GGCUGCAGAGCCUGCAGACCUACGUGACCCAGCAGCUGA | |
| | UCCGGGCCGCCGAGAUUCGGGCCAGCGCCAACCUGGCCGC | |
| | CACCAAGAUGAGCGAGUGCGUGCUGGGCCAGAGCAAGCG | |
| | GGUGGACUUCUGCGGCAAGGGCUACCACCUGAUGAGCUU | |
| | UCCCCAGAGCGCACCCCACGGAGUGGUGUUCCUGCACGUG | |
| | ACCUACGUGCCCGCCCAGGAGAAGAACUUCACCACCGCCC | |
| | CAGCCAUCUGCCACGACGGCAAGGCCCACUUUCCCCGGGA | |
| | GGGCGUGUUCGUGAGCAACGGCACCCACUGGUUCGUGAC | |
| | CCAGCGGAACUUCUACGAGCCCCAGAUCAUCACCACCGAC | |
| | AACACCUUCGUGAGCGGCAACUGCGACGUGGUGAUCGGC | |
| | AUCGUGAACAACACCGUGUACGAUCCCCUGCAGCCCGAGC | |
| | UGGACAGCUUCAAGGAGGAGCUGGACAAGUACUUCAAGA | |
| | AUCACACCAGCCCCGACGUGGACCUGGGCGACAUCAGCGG | |
| | CAUCAACGCCAGCGUGGUGAACAUCCAGAAGGAGAUCGA | |
| | UCGGCUGAACGAGGUGGCCAAGAACCUGAACGAGAGCCU | |
| | GAUCGACCUGCAGGAGCUGGGCAAGUACGAGCAGUACAU | |
| | CAAGUGGCCCUGGUACAUCUGGCUGGGCUUCAUCGCCGG | |
| | CCUGAUCGCCAUCGUGAUGGUGACCAUCAUGCUGUGCUG | |
| | CAUGACCAGCUGCUGCAGCUGCCUGAAGGGCUGUUGCAG | |
| | CUGCGGCAGCUGCUGCAAGUUCGACGAGGACGACAGCGA | |
| | GCCCGUGCUGAAGGGCGUGAAGCUGCACUACACC | |
| 3′UTR | UGAUAAUAGGCUGGAGCCUCGGUGGCCUAGCUUCUUGCC | 4 |
| | CCUUGGGCCUCCCCCCAGCCCCUCCUCCCCUUCCUGCACC | |
| | CGUACCCCCGUGGUCUUUGAAUAAAGUCUGAGUGGGCGG | |
| | C | |
| Corresponding amino | MFVFLVLLPLVSSQCVNLTTRTQLPPAYTNSFTRGVYYPDKVF | 32 |
| acid sequence | RSSVLHSTQDLFLPFFSNVTWFHAIHVSGTNGTKRFDNPVLPF | |
| | NDGVYFASTEKSNIIRGWIFGTTLDSKTQSLLIVNNATNVVIKV | |
| | CEFQFCNDPFLGVYYHKNNKSWMESEFRVYSSANNCTFEYVS | |
| | QPFLMDLEGKQGNFKNLREFVFKNIDGYFKIYSKHTPINLVRD | |
| | LPQGFSALEPLVDLPIGINITRFQTLLALHRSYLTPGDSSSGWT | |
| | AGAAAYYVGYLQPRTFLLKYNENGTITDAVDCALDPLSETKC | |
| | TLKSFTVEKGIYQTSNFRVQPTESIVRFPNITNLCPFGEVFNATR | |
| | FASVYAWNRKRISNCVADYSVLYNSASFSTFKCYGVSPTKLN | |
| | DLCFTNVYADSFVIRGDEVRQIAPGQTGKIADYNYKLPDDFTG | |
| | CVIAWNSNNLDSKVGGNYNYLYRLFRKSNLKPFERDISTEIYQ | |
| | AGSTPCNGVEGFNCYFPLQSYGFQPTNGVGYQPYRVVVLSFE | |
| | LLHAPATVCGPKKSTNLVKNKCVNFNFNGLTGTGVLTESNKK | |
| | FLPFQQFGRDIADTTDAVRDPQTLEILDITPCSFGGVSVITPGTN | |
| | TSNQVAVLYQDVNCTEVPVAIHADQLTPTWRVYSTGSNVFQT | |
| | RAGCLIGAEHVNNSYECDIPIGAGICASYQTQTNSPRRARSVA | |
| | SQSIIAYTMSLGAENSVAYSNNSIAIPTNFTISVTTEILPVSMTK | |
| | TSVDCTMYICGDSTECSNLLLQYGSFCTQLNRALTGIAVEQDK | |
| | NTQEVFAQVKQIYKTPPIKDFGGFNFSQILPDPSKPSKRSFIEDL | |
| | LFNKVTLADAGFIKQYGDCLGDIAARDLICAQKFNGLTVLPPL | |
| | LTDEMIAQYTSALLAGTITSGWTFGAGAALQIPFAMQMAYRF | |
| | NGIGVTQNVLYENQKLIANQFNSAIGKIQDSLSSTASALGKLQ | |
| | DVVNQNAQALNTLVKQLSSNFGAISSVLNDILSRLDKVEAEV | |
| | QIDRLITGRLQSLQTYVTQQLIRAAEIRASANLAATKMSECVL | |
| | GQSKRVDFCGKGYHLMSFPQSAPHGVVFLHVTYVPAQEKNF | |
| | TTAPAICHDGKAHFPREGVFVSNGTHWFVTQRNFYEPQIITTD | |
| | NTFVSGNCDVVIGIVNNTVYDPLQPELDSFKEELDKYFKNHTS | |
| | PDVDLGDISGINASVVNIQKEIDRLNEVAKNLNESLIDLQELGK | |
| | YEQYIKWPWYIWLGFIAGLIAIVMVTIMLCCMTSCCSCLKGCC | |
| | SCGSCCKFDEDDSEPVLKGVKLHYT | |
| PolyA tail | 100 nt | |

SARS-CoV-2 S protein Variant 1

| SEQ ID NO: 1 consists of from 5′ end to 3′ end: 5′ UTR SEQ ID NO: 2, mRNA ORF SEQ ID | | 1 |
|---|---|---|
| NO: 3, and 3′ UTR SEQ ID NO: 4. | | |
| Chemistry | 1-methylpseudouridine | |
| Cap | 7mG(5′)ppp(5′)NlmpNp | |
| 5′UTR | GGGAAAUAAGAGAGAAAAGAAGAGUAAGAAGAAAUAUA | 2 |
| | AGACCCCGGCGCCGCCACC | |
| ORF of mRNA | AUGUUCGUCUUCCUCGUCUUGCUGCCGCUGGUGUCGAGC | 3 |
| Construct | CAGUGCGUGAACCUCACCACAAGGACGCAGCUCCCACCGG | |
| (excluding the stop | CCUACACGAACAGCUUCACGCGCGGCGUGUACUACCCCGA | |
| codon) | CAAGGUGUUCCGGUCGUCGGUCCUCCACUCCACGCAGGAC | |
| | CUCUUCCUGCCCUUCUUCAGCAACGUGACCUGGUUCCACG | |
| | CCAUCCACGUCUCCGGGACGAACGGGACGAAGCGGUUCG | |
| | ACAACCCGGUCCUCCCGUUCAACGACGGCGUCUACUUCGC | |
| | GAGCACGGAGAAGUCGAACAUCAUCCGGGGCUGGAUCUU | |
| | CGGCACGACCCUGGACUCGAAGACCCAGUCCCUACUUAUC | |
| | GUGAACAACGCCACCAACGUCGUCAUCAAGGUCUGCGAG | |
| | UUCCAGUUCUGCAACGACCCCUUCCUCGGCGUCUACUACC | |
| | ACAAGAACAACAAGUCGUGGAUGGAGUCGGAGUUCCGGG | |
| | UGUACAGCUCGGCGAACAACUGCACCUUCGAGUACGUGU | |
| | CGCAGCCGUUCCUCAUGGACCUCGAGGGCAAGCAGGGUA | |
| | ACUUCAAGAACCUGCGCGAGUUCGUCUUCAAGAACAUCG | |
| | ACGGCUACUUCAAGAUCUACUCCAAGCACACGCCCAUCAA | |
| | CCUGGUCCGCGACCUCCCGCAAGGCUUCUCCGCCCUCGAG | |
| | CCUCUGGUCGACCUGCCGAUCGGCAUCAACAUCACGAGG | |
| | UUCCAGACGCUCCUGGCGCUGCACCGGUCGUACCUGACGC | |
| | CAGGCGACUCCUCCUCGGGCUGGACAGCAGGCGCGGCUGC | |
| | CUACUACGUCGGGUACCUGCAGCCCCGCACGUUCCUCCUG | |
| | AAGUACAACGAGAACGGCACUAUCACGGACGCCGUCGAC | |
| | UGCGCCCUGGACCCACUGUCGGAGACGAAGUGCACGCUG | |
| | AAGUCGUUCACCGUGGAGAAGGGUAUCUACCAGACCUCC | |
| | AACUUCCGGGUCCAGCCGACGGAGUCGAUCGUGCGGUUC | |
| | CCCAACAUCACGAACCUGUGCCCCUUCGGUGAGGUCUUCA | |
| | ACGCCACCCGGUUCGCGUCGGUCUACGCGUGGAACCGUA | |
| | AGCGCAUCUCGAACUGCGUGGCGGACUACUCCGUCCUCU | |
| | ACAACAGCGCGUCCUUCAGCACCUUCAAGUGCUACGGCG | |
| | UCAGCCCCACGAAGCUGAACGACCUCUGCUUCACCAACGU | |
| | CUACGCAGACUCCUUCGUGAUCCGGGGUGACGAGGUGCG | |
| | ACAGAUCGCCCCUGGUCAGACCGGGAAGAUCGCCGACUA | |
| | CAACUACAAGCUGCCCGACGACUUCACCGGCUGCGUGAUC | |
| | GCGUGGAACAGCAACAACCUGGACUCCAAGGUCGGAGGU | |
| | AACUACAACUACCUCUACCGGCUGUUCCGCAAGUCCAACC | |
| | UGAAGCCGUUCGAGCGGGACAUCUCCACGGAGAUCUACC | |
| | AAGCCGGCUCGACCCCUUGUAACGGGGUGGAGGGGUUCA | |
| | ACUGCUACUUCCCACUGCAGUCCUACGGGUUCCAGCCCAC | |
| | CAACGGGGUCGGGUACCAGCCGUACCGCGUGGUGGUCCU | |
| | GUCCUUCGAGCUGCUGCACGCGCCAGCCACGGUGUGCGG | |
| | GCCAAAGAAGAGCACGAACCUGGUCAAGAACAAGUGCGU | |
| | CAACUUCAACUUCAACGGCCUGACGGGGACAGGGGUCCU | |
| | CACGGAGUCGAACAAGAAGUUCCUGCCGUUCCAGCAGUU | |
| | CGGCCGUGACAUCGCAGACACGACUGACGCCGUCCGCGAC | |
| | CCUCAGACCCUCGAGAUCCUCGACAUCACCCCGUGCUCGU | |
| | UCGGCGGAGUGAGCGUCAUCACCCCGGGGACCAACACAU | |
| | CGAACCAGGUGGCCGUCCUGUACCAGGACGUCAACUGCA | |
| | CGGAGGUCCCUGUGGCGAUCCACGCCGACCAGCUCACGCC | |
| | CACCUGGCGCGUCUACUCCACCGGGUCCAACGUGUUCCAG | |
| | ACCCGCGCAGGCUGCCUGAUCGGGGCCGAGCACGUCAACA | |
| | ACAGCUACGAGUGCGACAUCCCCAUCGGAGCGGGCAUCU | |
| | GCGCCAGCUACCAGACGCAGACGAACUCUCCAAGGCGCGC | |
| | UCGUAGCGUGGCCUCCCAGUCCAUCAUCGCGUACACGAU | |
| | GUCCCUUGGGGCCGAGAACUCGGUCGCAUACAGCAACAA | |
| | CUCCAUCGCCAUCCCCACCAACUUCACGAUCUCGGUCACC | |
| | ACCGAGAUCCUCCCGGUCAGCAUGACGAAGACGUCGGUG | |
| | GACUGCACCAUGUACAUCUGCGGGGACAGCACGGAGUGC | |
| | UCGAACCUGCUCCUGCAGUACGGGAGCUUCUGCACCCAGC | |
| | UGAACAGGGCGCUGACGGGGAUCGCGGUGGAGCAGGACA | |
| | AGAACACCCAGGAGGUGUUCGCGCAGGUGAAGCAGAUCU | |
| | ACAAGACGCCUCCAAUCAAGGACUUCGGCGGGUUCAACU | |
| | UCUCGCAGAUCCUCCCCGACCCGUCCAAGCCGUCGAAGCG | |
| | GUCGUUCAUCGAGGACCUGCUCUUCAACAAGGUGACGUU | |
| | GGCCGACGCGGGCUUCAUCAAGCAGUACGGGGACUGCCU | |
| | UGGGGACAUCGCUGCCCGCGACCUCAUCUGCGCCCAGAAG | |
| | UUCAACGGGCUGACUGUGCUCCCGCCCCUGCUGACGGACG | |
| | AGAUGAUCGCGCAGUACACGUCCGCGCUGCUCGCUGGAA | |
| | CGAUCACCUCCGGGUGGACCUUCGGCGCUGGAGCGGCUC | |
| | UGCAGAUCCCGUUCGCGAUGCAGAUGGCGUACCGGUUCA | |
| | ACGGCAUCGGGGUGACCCAGAACGUCCUCUACGAGAACC | |
| | AGAAGCUGAUCGCCAACCAGUUCAACUCCGCGAUCGGCA | |
| | AGAUCCAGGACUCGCUGAGCUCCACGGCUUCCGCCCUCGG | |
| | GAAGCUUCAGGACGUGGUGAACCAGAACGCCCAGGCCCU | |
| | CAACACCCUGGUGAAGCAGCUGAGCUCGAACUUCGGCGC | |
| | CAUCUCGAGCGUGCUCAACGACAUCCUGAGCCGUCUGGA | |
| | CCCUCCCGAGGCGGAGGUGCAGAUCGACCGGCUCAUCACG | |
| | GGCCGGCUUCAGUCCCUGCAGACGUACGUGACCCAGCAGC | |
| | UCAUACGGGCGGCGGAGAUACGCGCCUCCGCCAACCUGGC | |
| | CGCGACGAAGAUGUCCGAGUGCGUCCUCGGACAGAGCAA | |
| | GCGCGUGGACUUCUGCGGCAAGGGGUACCACCUCAUGAG | |
| | CUUUCCCCAGUCGGCUCCUCACGGGGUCGUCUUCCUGCAC | |
| | GUGACGUACGUCCCGGCGCAGGAGAAGAACUUCACCACC | |
| | GCCCCAGCGAUCUGCCACGACGGGAAGGCGCACUUCCCGC | |
| | GCGAGGGCGUCUUCGUCUCCAACGGGACCCACUGGUUCG | |
| | UCACCCAGCGGAACUUCUACGAGCCGCAGAUCAUCACGAC | |
| | CGACAACACGUUCGUAUCCGGGAACUGCGACGUCGUCAU | |
| | CGGCAUCGUCAACAACACGGUCUACGACCCACUGCAGCCG | |
| | GAGCUGGACUCGUUCAAGGAGGAGCUGGACAAGUAUUUC | |
| | AAGAACCACACCUCGCCCGACGUGGACCUGGGCGACAUCA | |
| | GCGGGAUCAACGCGUCGGUCGUGAACAUCCAGAAGGAGA | |
| | UCGACCGACUGAACGAGGUCGCCAAGAACCUGAACGAGU | |
| | CCCUGAUCGACCUGCAAGAGCUCGGCAAGUACGAGCAGU | |
| | ACAUCAAGUGGCCUUGGUACAUCUGGCUCGGCUUCAUCG | |
| | CGGGGCUGAUCGCCAUCGUGAUGGUCACCAUCAUGUUGU | |
| | GCUGCAUGACCUCCUGCUGCUCGUGCCUCAAGGGGUGCU | |
| | GCAGCUGCGGGUCCUGCUGCAAGUUCGACGAGGACGACU | |
| | CGGAGCCGGUCCUCAAGGGCGUCAAGCUCCACUACACC | |
| 3′UTR | UGAUAAUAGGCUGGAGCCUCGGUGGCCUAGCUUCUUGCC | 4 |
| | CCUUGGGCCUCCCCCCAGCCCCUCCUCCCCUUCCUGCACC | |
| | CGUACCCCCGUGGUCUUUGAAUAAAGUCUGAGUGGGCGG | |
| | C | |
| Corresponding amino | MFVFLVLLPLVSSQCVNLTTRTQLPPAYTNSFTRGVYYPDKVF | 5 |
| acid sequence | RSSVLHSTQDLFLPFFSNVTWFHAIHVSGTNGTKRFDNPVLPF | |
| | NDGVYFASTEKSNIIRGWIFGTTLDSKTQSLLIVNNATNVVIKV | |
| | CEFQFCNDPFLGVYYHKNNKSWMESEFRVYSSANNCTFEYVS | |
| | QPFLMDLEGKQGNFKNLREFVFKNIDGYFKIYSKHTPINLVRD | |
| | LPQGFSALEPLVDLPIGINITRFQTLLALHRSYLTPGDSSSGWT | |
| | AGAAAYYVGYLQPRTFLLKYNENGTITDAVDCALDPLSETKC | |
| | TLKSFTVEKGIYQTSNFRVQPTESIVRFPNITNLCPFGEVFNATR | |
| | FASVYAWNRKRISNCVADYSVLYNSASFSTFKCYGVSPTKLN | |
| | DLCFTNVYADSFVIRGDEVRQIAPGQTGKIADYNYKLPDDFTG | |
| | CVIAWNSNNLDSKVGGNYNYLYRLFRKSNLKPFERDISTEIYQ | |
| | AGSTPCNGVEGFNCYFPLQSYGFQPTNGVGYQPYRVVVLSFE | |
| | LLHAPATVCGPKKSTNLVKNKCVNFNFNGLTGTGVLTESNKK | |
| | FLPFQQFGRDIADTTDAVRDPQTLEILDITPCSFGGVSVITPGTN | |
| | TSNQVAVLYQDVNCTEVPVAIHADQLTPTWRVYSTGSNVFQT | |
| | RAGCLIGAEHVNNSYECDIPIGAGICASYQTQTNSPRRARSVA | |
| | SQSIIAYTMSLGAENSVAYSNNSIAIPTNFTISVTTEILPVSMTK | |
| | TSVDCTMYICGDSTECSNLLLQYGSFCTQLNRALTGIAVEQDK | |
| | NTQEVFAQVKQIYKTPPIKDFGGFNFSQILPDPSKPSKRSFIEDL | |
| | LFNKVTLADAGFIKQYGDCLGDIAARDLICAQKFNGLTVLPPL | |
| | LTDEMIAQYTSALLAGTITSGWTFGAGAALQIPFAMQMAYRF | |
| | NGIGVTQNVLYENQKLIANQFNSAIGKIQDSLSSTASALGKLQ | |
| | DVVNQNAQALNTLVKQLSSNFGAISSVLNDILSRLDPPEAEVQ | |
| | IDRLITGRLQSLQTYVTQQLIRAAEIRASANLAATKMSECVLG | |
| | QSKRVDFCGKGYHLMSFPQSAPHGVVFLHVTYVPAQEKNFTT | |
| | APAICHDGKAHFPREGVFVSNGTHWFVTQRNFYEPQIITTDNT | |
| | FVSGNCDVVIGIVNNTVYDPLQPELDSFKEELDKYFKNHTSPD | |
| | VDLGDISGINASVVNIQKEIDRLNEVAKNLNESLIDLQELGKYE | |
| | QYIKWPWYIWLGFIAGLIAIVMVTIMLCCMTSCCSCLKGCCSC | |
| | GSCCKFDEDDSEPVLKGVKLHYT | |
| PolyA tail | 100 nt | |

SARS-CoV-2 S Protein Variant 2

| SEQ ID NO: 6 consists of from 5′ end to 3′ end: 5′ UTR SEQ ID NO: 2, mRNA ORF SEQ ID | | 6 |
|---|---|---|
| NO: 7, and 3′ UTR SEQ ID NO: 4. | | |
| Chemistry | 1-methylpseudouridine | |
| Cap | 7mG(5′)ppp(5′)NlmpNp | |
| 5′UTR | GGGAAAUAAGAGAGAAAAGAAGAGUAAGAAGAAAUAUA | 2 |
| | AGACCCCGGCGCCGCCACC | |
| ORF of mRNA | AUGUUCGUGUUCCUGGUGCUGCUGCCCCUGGUGAGCAGC | 7 |
| Construct | CAGUGCGUGAACCUGACCACCAGGACCCAGCUGCCGCCUG | |
| (excluding the stop | CCUACACCAACAGCUUCACCCGCGGUGUGUACUACCCCGA | |
| codon) | CAAGGUGUUCAGGUCCAGCGUGCUGCACAGCACCCAGGA | |
| | CCUGUUCCUCCCCUUCUUCAGCAACGUGACCUGGUUCCAC | |
| | GCCAUCCACGUGAGCGGCACCAACGGCACCAAGCGGUUCG | |
| | ACAACCCCGUGCUGCCCUUCAACGACGGCGUGUACUUCGC | |
| | CAGCACCGAGAAGAGCAACAUCAUCCGGGGCUGGAUCUU | |
| | CGGCACCACACUCGACAGCAAGACCCAGAGCCUGCUGAUC | |
| | GUGAACAACGCCACCAACGUGGUGAUCAAGGUGUGCGAA | |
| | UUCCAGUUCUGCAACGACCCCUUCCUGGGCGUGUACUACC | |
| | ACAAGAACAACAAGAGCUGGAUGGAGAGCGAGUUCCGCG | |
| | UGUACAGCAGCGCCAACAACUGCACCUUCGAGUACGUGA | |
| | GCCAGCCCUUCCUGAUGGACCUGGAGGGCAAGCAGGGCA | |
| | AUUUCAAGAACCUGAGGGAGUUCGUGUUCAAGAACAUCG | |
| | ACGGCUACUUCAAGAUCUACAGCAAGCACACGCCCAUCA | |
| | ACCUGGUGCGGGACUUGCCCCAGGGCUUCAGCGCCCUGG | |
| | AGCCCUUAGUGGACCUGCCUAUCGGCAUCAACAUCACCCG | |
| | GUUCCAGACCCUGCUGGCCCUGCACCGGAGCUACCUGACU | |
| | CCCGGCGACAGCAGCUCCGGGUGGACUGCCGGUGCUGCCG | |
| | CCUACUACGUGGGGUACCUGCAGCCCCGGACCUUCCUGCU | |
| | GAAGUACAACGAGAACGGCACCAUCACCGACGCCGUGGA | |
| | CUGCGCCCUGGAUCCACUGAGCGAGACCAAGUGCACCCUG | |
| | AAGAGCUUCACCGUGGAGAAGGGCAUCUACCAGACCAGC | |
| | AACUUCCGGGUGCAGCCCACCGAGAGCAUCGUGAGGUUC | |
| | CCCAACAUCACCAACCUGUGCCCUUUCGGCGAGGUGUUCA | |
| | ACGCCACCCGCUUCGCCUCCGUGUACGCCUGGAACAGGAA | |
| | GAGGAUCAGCAACUGCGUGGCCGACUACAGCGUGCUGUA | |
| | CAACAGCGCCAGCUUCUCCACCUUCAAGUGCUACGGCGUG | |
| | AGCCCAACCAAGCUGAACGACCUGUGCUUUACCAACGUG | |
| | UACGCCGAUAGCUUCGUGAUCCGCGGCGACGAAGUGCGG | |
| | CAGAUCGCUCCUGGGCAGACCGGAAAGAUCGCCGACUAC | |
| | AACUACAAGCUGCCCGACGACUUCACCGGGUGCGUGAUC | |
| | GCUUGGAACAGCAACAACCUGGACAGCAAGGUGGGCGGC | |
| | AACUACAACUACCUGUACCGGCUGUUCCGGAAGAGCAAC | |
| | CUGAAGCCCUUCGAGCGCGACAUCUCCACCGAGAUCUACC | |
| | AGGCCGGCUCCACACCCUGCAACGGCGUGGAGGGCUUCA | |
| | ACUGCUACUUUCCCCUGCAGUCCUACGGCUUCCAGCCCAC | |
| | CAACGGCGUGGGCUACCAGCCAUACCGCGUGGUGGUGCU | |
| | GUCCUUCGAGCUGCUGCACGCUCCCGCCACCGUUUGCGGC | |
| | CCCAAGAAGUCCACCAACCUGGUGAAGAACAAGUGCGUG | |
| | AACUUCAACUUCAACGGUCUCACGGGCACCGGGGUGCUG | |
| | ACCGAGAGCAACAAGAAGUUCCUGCCCUUUCAGCAGUUC | |
| | GGCAGGGACAUCGCCGACACCACAGACGCCGUGCGGGAU | |
| | CCCCAGACCCUGGAGAUCCUGGACAUCACCCCGUGCAGCU | |
| | UCGGCGGCGUGAGCGUGAUCACGCCCGGCACCAACACCAG | |
| | CAACCAGGUGGCCGUGCUGUACCAGGACGUGAACUGCAC | |
| | CGAGGUGCCCGUGGCCAUCCACGCCGACCAGCUGACUCCC | |
| | ACCUGGCGCGUGUAUAGCACCGGCAGCAACGUGUUCCAG | |
| | ACACGGGCCGGCUGCCUGAUCGGCGCCGAGCACGUGAAC | |
| | AACUCCUACGAGUGCGACAUCCCCAUCGGCGCUGGCAUCU | |
| | GCGCCAGCUACCAGACCCAGACCAACAGCCCCAGACGGGC | |
| | CAGGUCCGUGGCUUCCCAGAGCAUCAUCGCCUACACCAUG | |
| | UCCCUGGGCGCCGAGAACAGCGUGGCCUACAGCAACAAC | |
| | UCCAUCGCCAUCCCCACCAACUUCACCAUCAGCGUGACCA | |
| | CCGAGAUCCUGCCCGUGAGCAUGACCAAGACCUCCGUGG | |
| | ACUGCACCAUGUACAUCUGCGGCGACAGCACCGAGUGCA | |
| | GCAACCUGCUGCUGCAGUACGGCAGCUUCUGCACCCAGCU | |
| | GAACAGGGCCCUGACCGGCAUCGCCGUGGAGCAGGACAA | |
| | GAACACCCAGGAGGUGUUCGCCCAGGUGAAGCAGAUCUA | |
| | CAAGACUCCACCUAUCAAGGACUUCGGCGGGUUCAACUU | |
| | CAGCCAGAUCCUCCCCGACCCCUCCAAGCCCAGCAAGCGG | |
| | AGCUUCAUCGAGGACCUGCUGUUCAACAAGGUGACCCUG | |
| | GCUGACGCCGGCUUUAUCAAGCAGUACGGCGACUGCCUU | |
| | GGCGACAUCGCCGCCAGGGACCUGAUCUGCGCCCAGAAG | |
| | UUCAACGGCCUGACCGUGCUGCCGCCACUGCUGACCGACG | |
| | AGAUGAUCGCCCAGUACACCUCUGCCCUGCUGGCCGGUAC | |
| | CAUCACCUCCGGCUGGACAUUUGGUGCUGGCGCUGCGCU | |
| | GCAGAUCCCCUUCGCCAUGCAGAUGGCCUACCGCUUCAAC | |
| | GGCAUCGGGGUGACCCAGAACGUGCUGUACGAGAACCAG | |
| | AAGCUGAUCGCCAACCAGUUCAACAGCGCCAUCGGCAAG | |
| | AUCCAGGACAGCCUGAGCAGCACCGCCAGCGCUCUGGGCA | |
| | AGCUGCAGGACGUGGUGAACCAGAACGCCCAGGCCCUGA | |
| | ACACCCUGGUGAAGCAGCUGUCCAGCAACUUCGGCGCCA | |
| | UCAGCUCCGUGCUGAACGACAUCCUGAGCCGGCUGGAUC | |
| | CACCAGAGGCCGAGGUGCAGAUCGACCGUCUGAUCACCG | |
| | GUCGGCUGCAGAGCCUGCAGACCUACGUGACCCAGCAGC | |
| | UGAUCCGCGCCGCCGAAAUCCGCGCCUCCGCCAACCUGGC | |
| | CGCCACCAAGAUGUCCGAGUGCGUGCUGGGCCAGAGCAA | |
| | GCGGGUGGACUUCUGCGGCAAGGGCUACCACCUGAUGAG | |
| | CUUCCCACAGAGCGCUCCCCACGGGGUAGUGUUCCUGCAC | |
| | GUGACCUACGUGCCCGCCCAGGAGAAGAACUUCACCACU | |
| | GCACCCGCCAUCUGCCACGACGGCAAGGCCCACUUCCCUC | |
| | GGGAGGGCGUGUUCGUGAGCAACGGCACCCACUGGUUCG | |
| | UGACCCAGAGGAACUUCUACGAGCCCCAGAUCAUCACCAC | |
| | CGACAACACCUUCGUGUCCGGCAACUGCGACGUGGUGAU | |
| | CGGCAUAGUGAACAACACCGUGUACGACCCACUGCAGCCC | |
| | GAGCUGGACAGCUUCAAGGAGGAGCUGGACAAGUACUUC | |
| | AAGAACCACACCAGCCCAGACGUGGACCUGGGCGACAUC | |
| | UCCGGCAUCAACGCCUCCGUGGUGAACAUCCAGAAGGAG | |
| | AUCGACCGGCUGAACGAGGUGGCCAAGAACCUGAACGAG | |
| | AGCCUGAUCGACCUGCAGGAGCUGGGGAAGUACGAGCAG | |
| | UACAUCAAGUGGCCUUGGUACAUCUGGCUGGGCUUCAUC | |
| | GCCGGCCUGAUCGCCAUCGUGAUGGUGACCAUCAUGCUG | |
| | UGCUGCAUGACCAGCUGCUGCAGCUGCCUGAAGGGCUGU | |
| | UGCAGCUGCGGCAGCUGCUGCAAGUUCGACGAGGACGAC | |
| | AGCGAGCCCGUGCUGAAGGGCGUGAAGCUGCACUACACC | |
| 3′UTR | UGAUAAUAGGCUGGAGCCUCGGUGGCCUAGCUUCUUGCC | 4 |
| | CCUUGGGCCUCCCCCCAGCCCCUCCUCCCCUUCCUGCACC | |
| | CGUACCCCCGUGGUCUUUGAAUAAAGUCUGAGUGGGCGG | |
| | C | |
| Corresponding amino | MFVFLVLLPLVSSQCVNLTTRTQLPPAYTNSFTRGVYYPDKVF | 8 |
| acid sequence | RSSVLHSTQDLFLPFFSNVTWFHAIHVSGTNGTKRFDNPVLPF | |
| | NDGVYFASTEKSNIIRGWIFGTTLDSKTQSLLIVNNATNVVIKV | |
| | CEFQFCNDPFLGVYYHKNNKSWMESEFRVYSSANNCTFEYVS | |
| | QPFLMDLEGKQGNFKNLREFVFKNIDGYFKIYSKHTPINLVRD | |
| | LPQGFSALEPLVDLPIGINITRFQTLLALHRSYLTPGDSSSGWT | |
| | AGAAAYYVGYLQPRTFLLKYNENGTITDAVDCALDPLSETKC | |
| | TLKSFTVEKGIYQTSNFRVQPTESIVRFPNITNLCPFGEVFNATR | |
| | FASVYAWNRKRISNCVADYSVLYNSASFSTFKCYGVSPTKLN | |
| | DLCFTNVYADSFVIRGDEVRQIAPGQTGKIADYNYKLPDDFTG | |
| | CVIAWNSNNLDSKVGGNYNYLYRLFRKSNLKPFERDISTEIYQ | |
| | AGSTPCNGVEGFNCYFPLQSYGFQPTNGVGYQPYRVVVLSFE | |
| | LLHAPATVCGPKKSTNLVKNKCVNFNFNGLTGTGVLTESNKK | |
| | FLPFQQFGRDIADTTDAVRDPQTLEILDITPCSFGGVSVITPGTN | |
| | TSNQVAVLYQDVNCTEVPVAIHADQLTPTWRVYSTGSNVFQT | |
| | RAGCLIGAEHVNNSYECDIPIGAGICASYQTQTNSPRRARSVA | |
| | SQSIIAYTMSLGAENSVAYSNNSIAIPTNFTISVTTEILPVSMTK | |
| | TSVDCTMYICGDSTECSNLLLQYGSFCTQLNRALTGIAVEQDK | |
| | NTQEVFAQVKQIYKTPPIKDFGGFNFSQILPDPSKPSKRSFIEDL | |
| | LFNKVTLADAGFIKQYGDCLGDIAARDLICAQKFNGLTVLPPL | |
| | LTDEMIAQYTSALLAGTITSGWTFGAGAALQIPFAMQMAYRF | |
| | NGIGVTQNVLYENQKLIANQFNSAIGKIQDSLSSTASALGKLQ | |
| | DVVNQNAQALNTLVKQLSSNFGAISSVLNDILSRLDPPEAEVQ | |
| | IDRLITGRLQSLQTYVTQQLIRAAEIRASANLAATKMSECVLG | |
| | QSKRVDFCGKGYHLMSFPQSAPHGVVFLHVTYVPAQEKNFTT | |
| | APAICHDGKAHFPREGVFVSNGTHWFVTQRNFYEPQIITTDNT | |
| | FVSGNCDVVIGIVNNTVYDPLQPELDSFKEELDKYFKNHTSPD | |
| | VDLGDISGINASVVNIQKEIDRLNEVAKNLNESLIDLQELGKYE | |
| | QYIKWPWYIWLGFIAGLIAIVMVTIMLCCMTSCCSCLKGCCSC | |
| | GSCCKFDEDDSEPVLKGVKLHYT | |
| PolyA tail | 100 nt | |

SARS-CoV-2 S Protein Variant 3

| SEQ ID NO: 9 consists of from 5′ end to 3′ end: 5′ UTR SEQ ID NO: 2, mRNA ORF SEQ ID | | 9 |
|---|---|---|
| NO: 10, and 3′ UTR SEQ ID NO: 4. | | |
| Chemistry | 1-methylpseudouridine | |
| Cap | 7mG(5′)ppp(5′)NlmpNp | |
| 5′UTR | GGGAAAUAAGAGAGAAAAGAAGAGUAAGAAGAAAUAUA | 2 |
| | AGACCCCGGCGCCGCCACC | |
| ORF of mRNA | AUGUUCGUGUUCCUGGUGCUGCUGCCCCUGGUGAGCAGC | 10 |
| Construct | CAGUGCGUGAACCUGACCACCCGGACCCAGCUGCCACCAG | |
| (excluding the stop | CCUACACCAACAGCUUCACCCGGGGCGUCUACUACCCCGA | |
| codon) | CAAGGUGUUCCGGAGCAGCGUCCUGCACAGCACCCAGGA | |
| | CCUGUUCCUGCCCUUCUUCAGCAACGUGACCUGGUUCCAC | |
| | GCCAUCCACGUGAGCGGCACCAACGGCACCAAGCGGUUCG | |
| | ACAACCCCGUGCUGCCCUUCAACGACGGCGUGUACUUCGC | |
| | CAGCACCGAGAAGAGCAACAUCAUCCGGGGCUGGAUCUU | |
| | CGGCACCACCCUGGACAGCAAGACCCAGAGCCUGCUGAUC | |
| | GUGAAUAACGCCACCAACGUGGUGAUCAAGGUGUGCGAG | |
| | UUCCAGUUCUGCAACGACCCCUUCCUGGGCGUGUACUACC | |
| | ACAAGAACAACAAGAGCUGGAUGGAGAGCGAGUUCCGGG | |
| | UGUACAGCAGCGCCAACAACUGCACCUUCGAGUACGUGA | |
| | GCCAGCCCUUCCUGAUGGACCUGGAGGGCAAGCAGGGCA | |
| | ACUUCAAGAACCUGCGGGAGUUCGUGUUCAAGAACAUCG | |
| | ACGGCUACUUCAAGAUCUACAGCAAGCACACCCCAAUCA | |
| | ACCUGGUGCGGGAUCUGCCCCAGGGCUUCUCAGCCCUGG | |
| | AGCCCCUGGUGGACCUGCCCAUCGGCAUCAACAUCACCCG | |
| | GUUCCAGACCCUGCUGGCCCUGCACCGGAGCUACCUGACC | |
| | CCAGGCGACAGCAGCAGCGGGUGGACAGCAGGCGCGGCU | |
| | GCUUACUACGUGGGCUACCUGCAGCCCCGGACCUUCCUGC | |
| | UGAAGUACAACGAGAACGGCACCAUCACCGACGCCGUGG | |
| | ACUGCGCCCUGGACCCUCUGAGCGAGACCAAGUGCACCCU | |
| | GAAGAGCUUCACCGUGGAGAAGGGCAUCUACCAGACCAG | |
| | CAACUUCCGGGUGCAGCCCACCGAGAGCAUCGUGCGGUU | |
| | CCCCAACAUCACCAACCUGUGCCCCUUCGGCGAGGUGUUC | |
| | AACGCCACCCGGUUCGCCAGCGUGUACGCCUGGAACCGGA | |
| | AGCGGAUCAGCAACUGCGUGGCCGACUACAGCGUGCUGU | |
| | ACAACAGCGCCAGCUUCAGCACCUUCAAGUGCUACGGCG | |
| | UGAGCCCCACCAAGCUGAACGACCUGUGCUUCACCAACGU | |
| | GUACGCCGACAGCUUCGUGAUCCGUGGCGACGAGGUGCG | |
| | GCAGAUCGCACCCGGCCAGACAGGCAAGAUCGCCGACUAC | |
| | AACUACAAGCUGCCCGACGACUUCACCGGCUGCGUGAUC | |
| | GCCUGGAACAGCAACAACCUCGACAGCAAGGUGGGCGGC | |
| | AACUACAACUACCUGUACCGGCUGUUCCGGAAGAGCAAC | |
| | CUGAAGCCCUUCGAGCGGGACAUCAGCACCGAGAUCUAC | |
| | CAAGCCGGCUCCACCCCUUGCAACGGCGUGGAGGGCUUCA | |
| | ACUGCUACUUCCCUCUGCAGAGCUACGGCUUCCAGCCCAC | |
| | CAACGGCGUGGGCUACCAGCCCUACCGGGUGGUGGUGCU | |
| | GAGCUUCGAGCUGCUGCACGCCCCAGCCACCGUGUGUGGC | |
| | CCCAAGAAGAGCACCAACCUGGUGAAGAACAAGUGCGUG | |
| | AACUUCAACUUCAACGGCCUUACCGGCACCGGCGUGCUG | |
| | ACCGAGAGCAACAAGAAAUUCCUGCCCUUUCAGCAGUUC | |
| | GGCCGGGACAUCGCCGACACCACCGACGCUGUGCGGGAUC | |
| | CCCAGACCCUGGAGAUCCUGGACAUCACCCCUUGCAGCUU | |
| | CGGCGGCGUGAGCGUGAUCACCCCAGGCACCAACACCAGC | |
| | AACCAGGUGGCCGUGCUGUACCAGGACGUGAACUGCACC | |
| | GAGGUGCCCGUGGCCAUCCACGCCGACCAGCUGACACCCA | |
| | CCUGGCGGGUCUACAGCACCGGCAGCAACGUGUUCCAGA | |
| | CCCGGGCCGGUUGCCUGAUCGGCGCCGAGCACGUGAACA | |
| | ACAGCUACGAGUGCGACAUCCCCAUCGGCGCCGGCAUCUG | |
| | UGCCAGCUACCAGACCCAGACCAAUUCACCCGGCAGCGGC | |
| | GGCAGCGUGGCCAGCCAGAGCAUCAUCGCCUACACCAUG | |
| | AGCCUGGGCGCCGAGAACAGCGUGGCCUACAGCAACAAC | |
| | AGCAUCGCCAUCCCCACCAACUUCACCAUCAGCGUGACCA | |
| | CCGAGAUUCUGCCCGUGAGCAUGACCAAGACCAGCGUGG | |
| | ACUGCACCAUGUACAUCUGCGGCGACAGCACCGAGUGCA | |
| | GCAACCUGCUGCUGCAGUACGGCAGCUUCUGCACCCAGCU | |
| | GAACCGGGCCCUGACCGGCAUCGCCGUGGAGCAGGACAA | |
| | GAACACCCAGGAGGUGUUCGCCCAGGUGAAGCAGAUCUA | |
| | CAAGACCCCUCCCAUCAAGGACUUCGGCGGCUUCAACUUC | |
| | AGCCAGAUCCUGCCCGACCCCAGCAAGCCCAGCAAGCGGA | |
| | GCUUCAUCGAGGACCUGCUGUUCAACAAGGUGACCCUAG | |
| | CCGACGCCGGCUUCAUCAAGCAGUACGGCGACUGCCUCGG | |
| | CGACAUAGCCGCCCGGGACCUGAUCUGCGCCCAGAAGUUC | |
| | AACGGCCUGACCGUGCUGCCUCCCCUGCUGACCGACGAGA | |
| | UGAUCGCCCAGUACACCAGCGCCCUGUUAGCCGGAACCAU | |
| | CACCAGCGGCUGGACUUUCGGCGCUGGAGCCGCUCUGCA | |
| | GAUCCCCUUCGCCAUGCAGAUGGCCUACCGGUUCAACGGC | |
| | AUCGGCGUGACCCAGAACGUGCUGUACGAGAACCAGAAG | |
| | CUGAUCGCCAACCAGUUCAACAGCGCCAUCGGCAAGAUCC | |
| | AGGACAGCCUGAGCAGCACCGCUAGCGCCCUGGGCAAGC | |
| | UGCAGGACGUGGUGAACCAGAACGCCCAGGCCCUGAACA | |
| | CCCUGGUGAAGCAGCUGAGCAGCAACUUCGGCGCCAUCA | |
| | GCAGCGUGCUGAACGACAUCCUGAGCCGGCUGGACCCUCC | |
| | CGAGGCCGAGGUGCAGAUCGACCGGCUGAUCACUGGCCG | |
| | GCUGCAGAGCCUGCAGACCUACGUGACCCAGCAGCUGAU | |
| | CCGGGCCGCCGAGAUUCGGGCCAGCGCCAACCUGGCCGCC | |
| | ACCAAGAUGAGCGAGUGCGUGCUGGGCCAGAGCAAGCGG | |
| | GUGGACUUCUGCGGCAAGGGCUACCACCUGAUGAGCUUU | |
| | CCCCAGAGCGCACCCCACGGAGUGGUGUUCCUGCACGUGA | |
| | CCUACGUGCCCGCCCAGGAGAAGAACUUCACCACCGCCCC | |
| | AGCCAUCUGCCACGACGGCAAGGCCCACUUUCCCCGGGAG | |
| | GGCGUGUUCGUGAGCAACGGCACCCACUGGUUCGUGACC | |
| | CAGCGGAACUUCUACGAGCCCCAGAUCAUCACCACCGACA | |
| | ACACCUUCGUGAGCGGCAACUGCGACGUGGUGAUCGGCA | |
| | UCGUGAACAACACCGUGUACGAUCCCCUGCAGCCCGAGCU | |
| | GGACAGCUUCAAGGAGGAGCUGGACAAGUACUUCAAGAA | |
| | UCACACCAGCCCCGACGUGGACCUGGGCGACAUCAGCGGC | |
| | AUCAACGCCAGCGUGGUGAACAUCCAGAAGGAGAUCGAU | |
| | CGGCUGAACGAGGUGGCCAAGAACCUGAACGAGAGCCUG | |
| | AUCGACCUGCAGGAGCUGGGCAAGUACGAGCAGGGCAGC | |
| | GGCUACAUCCCCGAGGCCCCUAGAGACGGCCAGGCCUACG | |
| | UGCGGAAGGACGGCGAGUGGGUGCUGCUGAGCACCUUCC | |
| | UG | |
| 3′UTR | UGAUAAUAGGCUGGAGCCUCGGUGGCCUAGCUUCUUGCC | 4 |
| | CCUUGGGCCUCCCCCCAGCCCCUCCUCCCCUUCCUGCACC | |
| | CGUACCCCCGUGGUCUUUGAAUAAAGUCUGAGUGGGCGG | |
| | C | |
| Corresponding amino | MFVFLVLLPLVSSQCVNLTTRTQLPPAYTNSFTRGVYYPDKVF | 11 |
| acid sequence | RSSVLHSTQDLFLPFFSNVTWFHAIHVSGTNGTKRFDNPVLPF | |
| | NDGVYFASTEKSNIIRGWIFGTTLDSKTQSLLIVNNATNVVIKV | |
| | CEFQFCNDPFLGVYYHKNNKSWMESEFRVYSSANNCTFEYVS | |
| | QPFLMDLEGKQGNFKNLREFVFKNIDGYFKIYSKHTPINLVRD | |
| | LPQGFSALEPLVDLPIGINITRFQTLLALHRSYLTPGDSSSGWT | |
| | AGAAAYYVGYLQPRTFLLKYNENGTITDAVDCALDPLSETKC | |
| | TLKSFTVEKGIYQTSNFRVQPTESIVRFPNITNLCPFGEVFNATR | |
| | FASVYAWNRKRISNCVADYSVLYNSASFSTFKCYGVSPTKLN | |
| | DLCFTNVYADSFVIRGDEVRQIAPGQTGKIADYNYKLPDDFTG | |
| | CVIAWNSNNLDSKVGGNYNYLYRLFRKSNLKPFERDISTEIYQ | |
| | AGSTPCNGVEGFNCYFPLQSYGFQPTNGVGYQPYRVVVLSFE | |
| | LLHAPATVCGPKKSTNLVKNKCVNFNFNGLTGTGVLTESNKK | |
| | FLPFQQFGRDIADTTDAVRDPQTLEILDITPCSFGGVSVITPGTN | |
| | TSNQVAVLYQDVNCTEVPVAIHADQLTPTWRVYSTGSNVFQT | |
| | RAGCLIGAEHVNNSYECDIPIGAGICASYQTQTNSPGSGGSVA | |
| | SQSIIAYTMSLGAENSVAYSNNSIAIPTNFTISVTTEILPVSMTK | |
| | TSVDCTMYICGDSTECSNLLLQYGSFCTQLNRALTGIAVEQDK | |
| | NTQEVFAQVKQIYKTPPIKDFGGFNFSQILPDPSKPSKRSFIEDL | |
| | LFNKVTLADAGFIKQYGDCLGDIAARDLICAQKFNGLTVLPPL | |
| | LTDEMIAQYTSALLAGTITSGWTFGAGAALQIPFAMQMAYRF | |
| | NGIGVTQNVLYENQKLIANQFNSAIGKIQDSLSSTASALGKLQ | |
| | DVVNQNAQALNTLVKQLSSNFGAISSVLNDILSRLDPPEAEVQ | |
| | IDRLITGRLQSLQTYVTQQLIRAAEIRASANLAATKMSECVLG | |
| | QSKRVDFCGKGYHLMSFPQSAPHGVVFLHVTYVPAQEKNFTT | |
| | APAICHDGKAHFPREGVFVSNGTHWFVTQRNFYEPQIITTDNT | |
| | FVSGNCDVVIGIVNNTVYDPLQPELDSFKEELDKYFKNHTSPD | |
| | VDLGDISGINASVVNIQKEIDRLNEVAKNLNESLIDLQELGKYE | |
| | QGSGYIPEAPRDGQAYVRKDGEWVLLSTFL | |
| PolyA tail | 100 nt | |

SARS-CoV-2 S Protein Variant 4

| SEQ ID NO: 12 consists of from 5′ end to 3′ end: 5′ UTR SEQ ID NO: 2, mRNA ORF SEQ ID | | 12 |
|---|---|---|
| NO: 13, and 3′ UTR SEQ ID NO: 4. | | |
| Chemistry | 1-methylpseudouridine | |
| Cap | 7mG(5′)ppp(5′)NlmpNp | |
| 5′UTR | GGGAAAUAAGAGAGAAAAGAAGAGUAAGAAGAAAUAUA | 2 |
| | AGACCCCGGCGCCGCCACC | |
| ORF of mRNA | AUGUUCGUGUUCCUGGUGCUGCUGCCCCUGGUGAGCAGC | 13 |
| Construct | CAGUGCGUGAACCUGACCACCCGGACCCAGCUGCCACCAG | |
| (excluding the stop | CCUACACCAACAGCUUCACCCGGGGCGUCUACUACCCCGA | |
| codon) | CAAGGUGUUCCGGAGCAGCGUCCUGCACAGCACCCAGGA | |
| | CCUGUUCCUGCCCUUCUUCAGCAACGUGACCUGGUUCCAC | |
| | GCCAUCCACGUGAGCGGCACCAACGGCACCAAGCGGUUCG | |
| | ACAACCCCGUGCUGCCCUUCAACGACGGCGUGUACUUCGC | |
| | CAGCACCGAGAAGAGCAACAUCAUCCGGGGCUGGAUCUU | |
| | CGGCACCACCCUGGACAGCAAGACCCAGAGCCUGCUGAUC | |
| | GUGAAUAACGCCACCAACGUGGUGAUCAAGGUGUGCGAG | |
| | UUCCAGUUCUGCAACGACCCCUUCCUGGGCGUGUACUACC | |
| | ACAAGAACAACAAGAGCUGGAUGGAGAGCGAGUUCCGGG | |
| | UGUACAGCAGCGCCAACAACUGCACCUUCGAGUACGUGA | |
| | GCCAGCCCUUCCUGAUGGACCUGGAGGGCAAGCAGGGCA | |
| | ACUUCAAGAACCUGCGGGAGUUCGUGUUCAAGAACAUCG | |
| | ACGGCUACUUCAAGAUCUACAGCAAGCACACCCCAAUCA | |
| | ACCUGGUGCGGGAUCUGCCCCAGGGCUUCUCAGCCCUGG | |
| | AGCCCCUGGUGGACCUGCCCAUCGGCAUCAACAUCACCCG | |
| | GUUCCAGACCCUGCUGGCCCUGCACCGGAGCUACCUGACC | |
| | CCAGGCGACAGCAGCAGCGGGUGGACAGCAGGCGCGGCU | |
| | GCUUACUACGUGGGCUACCUGCAGCCCCGGACCUUCCUGC | |
| | UGAAGUACAACGAGAACGGCACCAUCACCGACGCCGUGG | |
| | ACUGCGCCCUGGACCCUCUGAGCGAGACCAAGUGCACCCU | |
| | GAAGAGCUUCACCGUGGAGAAGGGCAUCUACCAGACCAG | |
| | CAACUUCCGGGUGCAGCCCACCGAGAGCAUCGUGCGGUU | |
| | CCCCAACAUCACCAACCUGUGCCCCUUCGGCGAGGUGUUC | |
| | AACGCCACCCGGUUCGCCAGCGUGUACGCCUGGAACCGGA | |
| | AGCGGAUCAGCAACUGCGUGGCCGACUACAGCGUGCUGU | |
| | ACAACAGCGCCAGCUUCAGCACCUUCAAGUGCUACGGCG | |
| | UGAGCCCCACCAAGCUGAACGACCUGUGCUUCACCAACGU | |
| | GUACGCCGACAGCUUCGUGAUCCGUGGCGACGAGGUGCG | |
| | GCAGAUCGCACCCGGCCAGACAGGCAAGAUCGCCGACUAC | |
| | AACUACAAGCUGCCCGACGACUUCACCGGCUGCGUGAUC | |
| | GCCUGGAACAGCAACAACCUCGACAGCAAGGUGGGCGGC | |
| | AACUACAACUACCUGUACCGGCUGUUCCGGAAGAGCAAC | |
| | CUGAAGCCCUUCGAGCGGGACAUCAGCACCGAGAUCUAC | |
| | CAAGCCGGCUCCACCCCUUGCAACGGCGUGGAGGGCUUCA | |
| | ACUGCUACUUCCCUCUGCAGAGCUACGGCUUCCAGCCCAC | |
| | CAACGGCGUGGGCUACCAGCCCUACCGGGUGGUGGUGCU | |
| | GAGCUUCGAGCUGCUGCACGCCCCAGCCACCGUGUGUGGC | |
| | CCCAAGAAGAGCACCAACCUGGUGAAGAACAAGUGCGUG | |
| | AACUUCAACUUCAACGGCCUUACCGGCACCGGCGUGCUG | |
| | ACCGAGAGCAACAAGAAAUUCCUGCCCUUUCAGCAGUUC | |
| | GGCCGGGACAUCGCCGACACCACCGACGCUGUGCGGGAUC | |
| | CCCAGACCCUGGAGAUCCUGGACAUCACCCCUUGCAGCUU | |
| | CGGCGGCGUGAGCGUGAUCACCCCAGGCACCAACACCAGC | |
| | AACCAGGUGGCCGUGCUGUACCAGGACGUGAACUGCACC | |
| | GAGGUGCCCGUGGCCAUCCACGCCGACCAGCUGACACCCA | |
| | CCUGGCGGGUCUACAGCACCGGCAGCAACGUGUUCCAGA | |
| | CCCGGGCCGGUUGCCUGAUCGGCGCCGAGCACGUGAACA | |
| | ACAGCUACGAGUGCGACAUCCCCAUCGGCGCCGGCAUCUG | |
| | UGCCAGCUACCAGACCCAGACCAAUUCACCCCGGAGGGCA | |
| | AGGAGCGUGGCCAGCCAGAGCAUCAUCGCCUACACCAUG | |
| | AGCCUGGGCGCCGAGAACAGCGUGGCCUACAGCAACAAC | |
| | AGCAUCGCCAUCCCCACCAACUUCACCAUCAGCGUGACCA | |
| | CCGAGAUUCUGCCCGUGAGCAUGACCAAGACCAGCGUGG | |
| | ACUGCACCAUGUACAUCUGCGGCGACAGCACCGAGUGCA | |
| | GCAACCUGCUGCUGCAGUACGGCAGCUUCUGCACCCAGCU | |
| | GAACCGGGCCCUGACCGGCAUCGCCGUGGAGCAGGACAA | |
| | GAACACCCAGGAGGUGUUCGCCCAGGUGAAGCAGAUCUA | |
| | CAAGACCCCUCCCAUCAAGGACUUCGGCGGCUUCAACUUC | |
| | AGCCAGAUCCUGCCCGACCCCAGCAAGCCCAGCAAGCGGA | |
| | GCUUCAUCGAGGACCUGCUGUUCAACAAGGUGACCCUAG | |
| | CCGACGCCGGCUUCAUCAAGCAGUACGGCGACUGCCUCGG | |
| | CGACAUAGCCGCCCGGGACCUGAUCUGCGCCCAGAAGUUC | |
| | AACGGCCUGACCGUGCUGCCUCCCCUGCUGACCGACGAGA | |
| | UGAUCGCCCAGUACACCAGCGCCCUGUUAGCCGGAACCAU | |
| | CACCAGCGGCUGGACUUUCGGCGCUGGAGCCGCUCUGCA | |
| | GAUCCCCUUCGCCAUGCAGAUGGCCUACCGGUUCAACGGC | |
| | AUCGGCGUGACCCAGAACGUGCUGUACGAGAACCAGAAG | |
| | CUGAUCGCCAACCAGUUCAACAGCGCCAUCGGCAAGAUCC | |
| | AGGACAGCCUGAGCAGCACCGCUAGCGCCCUGGGCAAGC | |
| | UGCAGGACGUGGUGAACCAGAACGCCCAGGCCCUGAACA | |
| | CCCUGGUGAAGCAGCUGAGCAGCAACUUCGGCGCCAUCA | |
| | GCAGCGUGCUGAACGACAUCCUGAGCCGGCUGGACCCUCC | |
| | CGAGGCCGAGGUGCAGAUCGACCGGCUGAUCACUGGCCG | |
| | GCUGCAGAGCCUGCAGACCUACGUGACCCAGCAGCUGAU | |
| | CCGGGCCGCCGAGAUUCGGGCCAGCGCCAACCUGGCCGCC | |
| | ACCAAGAUGAGCGAGUGCGUGCUGGGCCAGAGCAAGCGG | |
| | GUGGACUUCUGCGGCAAGGGCUACCACCUGAUGAGCUUU | |
| | CCCCAGAGCGCACCCCACGGAGUGGUGUUCCUGCACGUGA | |
| | CCUACGUGCCCGCCCAGGAGAAGAACUUCACCACCGCCCC | |
| | AGCCAUCUGCCACGACGGCAAGGCCCACUUUCCCCGGGAG | |
| | GGCGUGUUCGUGAGCAACGGCACCCACUGGUUCGUGACC | |
| | CAGCGGAACUUCUACGAGCCCCAGAUCAUCACCACCGACA | |
| | ACACCUUCGUGAGCGGCAACUGCGACGUGGUGAUCGGCA | |
| | UCGUGAACAACACCGUGUACGAUCCCCUGCAGCCCGAGCU | |
| | GGACAGCUUCAAGGAGGAGCUGGACAAGUACUUCAAGAA | |
| | UCACACCAGCCCCGACGUGGACCUGGGCGACAUCAGCGGC | |
| | AUCAACGCCAGCGUGGUGAACAUCCAGAAGGAGAUCGAU | |
| | CGGCUGAACGAGGUGGCCAAGAACCUGAACGAGAGCCUG | |
| | AUCGACCUGCAGGAGCUGGGCAAGUACGAGCAGGGCAGC | |
| | GGCUACAUCCCCGAGGCCCCUAGAGACGGCCAGGCCUACG | |
| | UGCGGAAGGACGGCGAGUGGGUGCUGCUGAGCACCUUCC | |
| | UG | |
| 3′UTR | UGAUAAUAGGCUGGAGCCUCGGUGGCCUAGCUUCUUGCC | 4 |
| | CCUUGGGCCUCCCCCCAGCCCCUCCUCCCCUUCCUGCACC | |
| | CGUACCCCCGUGGUCUUUGAAUAAAGUCUGAGUGGGCGG | |
| | C | |
| Corresponding amino | MFVFLVLLPLVSSQCVNLTTRTQLPPAYTNSFTRGVYYPDKVF | 14 |
| acid sequence | RSSVLHSTQDLFLPFFSNVTWFHAIHVSGTNGTKRFDNPVLPF | |
| | NDGVYFASTEKSNIIRGWIFGTTLDSKTQSLLIVNNATNVVIKV | |
| | CEFQFCNDPFLGVYYHKNNKSWMESEFRVYSSANNCTFEYVS | |
| | QPFLMDLEGKQGNFKNLREFVFKNIDGYFKIYSKHTPINLVRD | |
| | LPQGFSALEPLVDLPIGINITRFQTLLALHRSYLTPGDSSSGWT | |
| | AGAAAYYVGYLQPRTFLLKYNENGTITDAVDCALDPLSETKC | |
| | TLKSFTVEKGIYQTSNFRVQPTESIVRFPNITNLCPFGEVFNATR | |
| | FASVYAWNRKRISNCVADYSVLYNSASFSTFKCYGVSPTKLN | |
| | DLCFTNVYADSFVIRGDEVRQIAPGQTGKIADYNYKLPDDFTG | |
| | CVIAWNSNNLDSKVGGNYNYLYRLFRKSNLKPFERDISTEIYQ | |
| | AGSTPCNGVEGFNCYFPLQSYGFQPTNGVGYQPYRVVVLSFE | |
| | LLHAPATVCGPKKSTNLVKNKCVNFNFNGLTGTGVLTESNKK | |
| | FLPFQQFGRDIADTTDAVRDPQTLEILDITPCSFGGVSVITPGTN | |
| | TSNQVAVLYQDVNCTEVPVAIHADQLTPTWRVYSTGSNVFQT | |
| | RAGCLIGAEHVNNSYECDIPIGAGICASYQTQTNSPRRARSVA | |
| | SQSIIAYTMSLGAENSVAYSNNSIAIPTNFTISVTTEILPVSMTK | |
| | TSVDCTMYICGDSTECSNLLLQYGSFCTQLNRALTGIAVEQDK | |
| | NTQEVFAQVKQIYKTPPIKDFGGFNFSQILPDPSKPSKRSFIEDL | |
| | LFNKVTLADAGFIKQYGDCLGDIAARDLICAQKFNGLTVLPPL | |
| | LTDEMIAQYTSALLAGTITSGWTFGAGAALQIPFAMQMAYRF | |
| | NGIGVTQNVLYENQKLIANQFNSAIGKIQDSLSSTASALGKLQ | |
| | DVVNQNAQALNTLVKQLSSNFGAISSVLNDILSRLDPPEAEVQ | |
| | IDRLITGRLQSLQTYVTQQLIRAAEIRASANLAATKMSECVLG | |
| | QSKRVDFCGKGYHLMSFPQSAPHGVVFLHVTYVPAQEKNFTT | |
| | APAICHDGKAHFPREGVFVSNGTHWFVTQRNFYEPQIITTDNT | |
| | FVSGNCDVVIGIVNNTVYDPLQPELDSFKEELDKYFKNHTSPD | |
| | VDLGDISGINASVVNIQKEIDRLNEVAKNLNESLIDLQELGKYE | |
| | QGSGYIPEAPRDGQAYVRKDGEWVLLSTFL | |
| PolyA tail | 100 nt | |

SARS-CoV-2 S Protein Variant 5

| SEQ ID NO: 15 consists of from 5′ end to 3′ end: 5′ UTR SEQ ID NO: 2, mRNA ORF SEQ ID | | 15 |
|---|---|---|
| NO: 16, and 3′ UTR SEQ ID NO: 4. | | |
| Chemistry | 1-methylpseudouridine | |
| Cap | 7mG(5′)ppp(5′)NlmpNp | |
| 5′UTR | GGGAAAUAAGAGAGAAAAGAAGAGUAAGAAGAAAUAUA | 2 |
| | AGACCCCGGCGCCGCCACC | |
| ORF of mRNA | AUGUUCGUGUUCCUGGUGCUGCUGCCCCUGGUGAGCAGC | 16 |
| Construct | CAGUGCGUGAACCUGACCACCCGGACCCAGCUGCCACCAG | |
| (excluding the stop | CCUACACCAACAGCUUCACCCGGGGCGUCUACUACCCCGA | |
| codon) | CAAGGUGUUCCGGAGCAGCGUCCUGCACAGCACCCAGGA | |
| | CCUGUUCCUGCCCUUCUUCAGCAACGUGACCUGGUUCCAC | |
| | GCCAUCCACGUGAGCGGCACCAACGGCACCAAGCGGUUCG | |
| | ACAACCCCGUGCUGCCCUUCAACGACGGCGUGUACUUCGC | |
| | CAGCACCGAGAAGAGCAACAUCAUCCGGGGCUGGAUCUU | |
| | CGGCACCACCCUGGACAGCAAGACCCAGAGCCUGCUGAUC | |
| | GUGAAUAACGCCACCAACGUGGUGAUCAAGGUGUGCGAG | |
| | UUCCAGUUCUGCAACGACCCCUUCCUGGGCGUGUACUACC | |
| | ACAAGAACAACAAGAGCUGGAUGGAGAGCGAGUUCCGGG | |
| | UGUACAGCAGCGCCAACAACUGCACCUUCGAGUACGUGA | |
| | GCCAGCCCUUCCUGAUGGACCUGGAGGGCAAGCAGGGCA | |
| | ACUUCAAGAACCUGCGGGAGUUCGUGUUCAAGAACAUCG | |
| | ACGGCUACUUCAAGAUCUACAGCAAGCACACCCCAAUCA | |
| | ACCUGGUGCGGGAUCUGCCCCAGGGCUUCUCAGCCCUGG | |
| | AGCCCCUGGUGGACCUGCCCAUCGGCAUCAACAUCACCCG | |
| | GUUCCAGACCCUGCUGGCCCUGCACCGGAGCUACCUGACC | |
| | CCAGGCGACAGCAGCAGCGGGUGGACAGCAGGCGCGGCU | |
| | GCUUACUACGUGGGCUACCUGCAGCCCCGGACCUUCCUGC | |
| | UGAAGUACAACGAGAACGGCACCAUCACCGACGCCGUGG | |
| | ACUGCGCCCUGGACCCUCUGAGCGAGACCAAGUGCACCCU | |
| | GAAGAGCUUCACCGUGGAGAAGGGCAUCUACCAGACCAG | |
| | CAACUUCCGGGUGCAGCCCACCGAGAGCAUCGUGCGGUU | |
| | CCCCAACAUCACCAACCUGUGCCCCUUCGGCGAGGUGUUC | |
| | AACGCCACCCGGUUCGCCAGCGUGUACGCCUGGAACCGGA | |
| | AGCGGAUCAGCAACUGCGUGGCCGACUACAGCGUGCUGU | |
| | ACAACAGCGCCAGCUUCAGCACCUUCAAGUGCUACGGCG | |
| | UGAGCCCCACCAAGCUGAACGACCUGUGCUUCACCAACGU | |
| | GUACGCCGACAGCUUCGUGAUCCGUGGCGACGAGGUGCG | |
| | GCAGAUCGCACCCGGCCAGACAGGCAAGAUCGCCGACUAC | |
| | AACUACAAGCUGCCCGACGACUUCACCGGCUGCGUGAUC | |
| | GCCUGGAACAGCAACAACCUCGACAGCAAGGUGGGCGGC | |
| | AACUACAACUACCUGUACCGGCUGUUCCGGAAGAGCAAC | |
| | CUGAAGCCCUUCGAGCGGGACAUCAGCACCGAGAUCUAC | |
| | CAAGCCGGCUCCACCCCUUGCAACGGCGUGGAGGGCUUCA | |
| | ACUGCUACUUCCCUCUGCAGAGCUACGGCUUCCAGCCCAC | |
| | CAACGGCGUGGGCUACCAGCCCUACCGGGUGGUGGUGCU | |
| | GAGCUUCGAGCUGCUGCACGCCCCAGCCACCGUGUGUGGC | |
| | CCCAAGAAGAGCACCAACCUGGUGAAGAACAAGUGCGUG | |
| | AACUUCAACUUCAACGGCCUUACCGGCACCGGCGUGCUG | |
| | ACCGAGAGCAACAAGAAAUUCCUGCCCUUUCAGCAGUUC | |
| | GGCCGGGACAUCGCCGACACCACCGACGCUGUGCGGGAUC | |
| | CCCAGACCCUGGAGAUCCUGGACAUCACCCCUUGCAGCUU | |
| | CGGCGGCGUGAGCGUGAUCACCCCAGGCACCAACACCAGC | |
| | AACCAGGUGGCCGUGCUGUACCAGGACGUGAACUGCACC | |
| | GAGGUGCCCGUGGCCAUCCACGCCGACCAGCUGACACCCA | |
| | CCUGGCGGGUCUACAGCACCGGCAGCAACGUGUUCCAGA | |
| | CCCGGGCCGGUUGCCUGAUCGGCGCCGAGCACGUGAACA | |
| | ACAGCUACGAGUGCGACAUCCCCAUCGGCGCCGGCAUCUG | |
| | UGCCAGCUACCAGACCCAGACCAAUUCACCCGGCAGCGGC | |
| | GGCAGCGUGGCCAGCCAGAGCAUCAUCGCCUACACCAUG | |
| | AGCCUGGGCGCCGAGAACAGCGUGGCCUACAGCAACAAC | |
| | AGCAUCGCCAUCCCCACCAACUUCACCAUCAGCGUGACCA | |
| | CCGAGAUUCUGCCCGUGAGCAUGACCAAGACCAGCGUGG | |
| | ACUGCACCAUGUACAUCUGCGGCGACAGCACCGAGUGCA | |
| | GCAACCUGCUGCUGCAGUACGGCAGCUUCUGCACCCAGCU | |
| | GAACCGGGCCCUGACCGGCAUCGCCGUGGAGCAGGACAA | |
| | GAACACCCAGGAGGUGUUCGCCCAGGUGAAGCAGAUCUA | |
| | CAAGACCCCUCCCAUCAAGGACUUCGGCGGCUUCAACUUC | |
| | AGCCAGAUCCUGCCCGACCCCAGCAAGCCCAGCAAGCGGA | |
| | GCUUCAUCGAGGACCUGCUGUUCAACAAGGUGACCCUAG | |
| | CCGACGCCGGCUUCAUCAAGCAGUACGGCGACUGCCUCGG | |
| | CGACAUAGCCGCCCGGGACCUGAUCUGCGCCCAGAAGUUC | |
| | AACGGCCUGACCGUGCUGCCUCCCCUGCUGACCGACGAGA | |
| | UGAUCGCCCAGUACACCAGCGCCCUGUUAGCCGGAACCAU | |
| | CACCAGCGGCUGGACUUUCGGCGCUGGAGCCGCUCUGCA | |
| | GAUCCCCUUCGCCAUGCAGAUGGCCUACCGGUUCAACGGC | |
| | AUCGGCGUGACCCAGAACGUGCUGUACGAGAACCAGAAG | |
| | CUGAUCGCCAACCAGUUCAACAGCGCCAUCGGCAAGAUCC | |
| | AGGACAGCCUGAGCAGCACCGCUAGCGCCCUGGGCAAGC | |
| | UGCAGGACGUGGUGAACCAGAACGCCCAGGCCCUGAACA | |
| | CCCUGGUGAAGCAGCUGAGCAGCAACUUCGGCGCCAUCA | |
| | GCAGCGUGCUGAACGACAUCCUGAGCCGGCUGGACCCUCC | |
| | CGAGGCCGAGGUGCAGAUCGACCGGCUGAUCACUGGCCG | |
| | GCUGCAGAGCCUGCAGACCUACGUGACCCAGCAGCUGAU | |
| | CCGGGCCGCCGAGAUUCGGGCCAGCGCCAACCUGGCCGCC | |
| | ACCAAGAUGAGCGAGUGCGUGCUGGGCCAGAGCAAGCGG | |
| | GUGGACUUCUGCGGCAAGGGCUACCACCUGAUGAGCUUU | |
| | CCCCAGAGCGCACCCCACGGAGUGGUGUUCCUGCACGUGA | |
| | CCUACGUGCCCGCCCAGGAGAAGAACUUCACCACCGCCCC | |
| | AGCCAUCUGCCACGACGGCAAGGCCCACUUUCCCCGGGAG | |
| | GGCGUGUUCGUGAGCAACGGCACCCACUGGUUCGUGACC | |
| | CAGCGGAACUUCUACGAGCCCCAGAUCAUCACCACCGACA | |
| | ACACCUUCGUGAGCGGCAACUGCGACGUGGUGAUCGGCA | |
| | UCGUGAACAACACCGUGUACGAUCCCCUGCAGCCCGAGCU | |
| | GGACAGCUUCAAGGAGGAGCUGGACAAGUACUUCAAGAA | |
| | UCACACCAGCCCCGACGUGGACCUGGGCGACAUCAGCGGC | |
| | AUCAACGCCAGCGUGGUGAACAUCCAGAAGGAGAUCGAU | |
| | CGGCUGAACGAGGUGGCCAAGAACCUGAACGAGAGCCUG | |
| | AUCGACCUGCAGGAGCUGGGCAAGUACGAGCAGUACAUC | |
| | AAGUGGCCCUGGUACAUCUGGCUGGGCUUCAUCGCCGGC | |
| | CUGAUCGCCAUCGUGAUGGUGACCAUCAUGCUGUGCUGC | |
| | AUGACCAGCUGCUGCAGCUGCCUGAAGGGCUGUUGCAGC | |
| | UGCGGCAGCUGCUGCAAGUUCGACGAGGACGACAGCGAG | |
| | CCCGUGCUGAAGGGCGUGAAGCUGCACUACACC | |
| 3′UTR | UGAUAAUAGGCUGGAGCCUCGGUGGCCUAGCUUCUUGCC | 4 |
| | CCUUGGGCCUCCCCCCAGCCCCUCCUCCCCUUCCUGCACC | |
| | CGUACCCCCGUGGUCUUUGAAUAAAGUCUGAGUGGGCGG | |
| | C | |
| Corresponding amino | MFVFLVLLPLVSSQCVNLTTRTQLPPAYTNSFTRGVYYPDKVF | 17 |
| acid sequence | RSSVLHSTQDLFLPFFSNVTWFHAIHVSGTNGTKRFDNPVLPF | |
| | NDGVYFASTEKSNIIRGWIFGTTLDSKTQSLLIVNNATNVVIKV | |
| | CEFQFCNDPFLGVYYHKNNKSWMESEFRVYSSANNCTFEYVS | |
| | QPFLMDLEGKQGNFKNLREFVFKNIDGYFKIYSKHTPINLVRD | |
| | LPQGFSALEPLVDLPIGINITRFQTLLALHRSYLTPGDSSSGWT | |
| | AGAAAYYVGYLQPRTFLLKYNENGTITDAVDCALDPLSETKC | |
| | TLKSFTVEKGIYQTSNFRVQPTESIVRFPNITNLCPFGEVFNATR | |
| | FASVYAWNRKRISNCVADYSVLYNSASFSTFKCYGVSPTKLN | |
| | DLCFTNVYADSFVIRGDEVRQIAPGQTGKIADYNYKLPDDFTG | |
| | CVIAWNSNNLDSKVGGNYNYLYRLFRKSNLKPFERDISTEIYQ | |
| | AGSTPCNGVEGFNCYFPLQSYGFQPTNGVGYQPYRVVVLSFE | |
| | LLHAPATVCGPKKSTNLVKNKCVNFNFNGLTGTGVLTESNKK | |
| | FLPFQQFGRDIADTTDAVRDPQTLEILDITPCSFGGVSVITPGTN | |
| | TSNQVAVLYQDVNCTEVPVAIHADQLTPTWRVYSTGSNVFQT | |
| | RAGCLIGAEHVNNSYECDIPIGAGICASYQTQTNSPGSGGSVA | |
| | SQSIIAYTMSLGAENSVAYSNNSIAIPTNFTISVTTEILPVSMTK | |
| | TSVDCTMYICGDSTECSNLLLQYGSFCTQLNRALTGIAVEQDK | |
| | NTQEVFAQVKQIYKTPPIKDFGGFNFSQILPDPSKPSKRSFIEDL | |
| | LFNKVTLADAGFIKQYGDCLGDIAARDLICAQKFNGLTVLPPL | |
| | LTDEMIAQYTSALLAGTITSGWTFGAGAALQIPFAMQMAYRF | |
| | NGIGVTQNVLYENQKLIANQFNSAIGKIQDSLSSTASALGKLQ | |
| | DVVNQNAQALNTLVKQLSSNFGAISSVLNDILSRLDPPEAEVQ | |
| | IDRLITGRLQSLQTYVTQQLIRAAEIRASANLAATKMSECVLG | |
| | QSKRVDFCGKGYHLMSFPQSAPHGVVFLHVTYVPAQEKNFTT | |
| | APAICHDGKAHFPREGVFVSNGTHWFVTQRNFYEPQIITTDNT | |
| | FVSGNCDVVIGIVNNTVYDPLQPELDSFKEELDKYFKNHTSPD | |
| | VDLGDISGINASVVNIQKEIDRLNEVAKNLNESLIDLQELGKYE | |
| | QYIKWPWYIWLGFIAGLIAIVMVTIMLCCMTSCCSCLKGCCSC | |
| | GSCCKFDEDDSEPVLKGVKLHYT | |
| PolyA tail | 100 nt | |

SARS-CoV-2 S Protein Variant 6

| SEQ ID NO: 18 consists of from 5′ end to 3′ end: 5′ UTR SEQ ID NO: 2, mRNA ORF SEQ ID | | 18 |
|---|---|---|
| NO: 19, and 3′ UTR SEQ ID NO: 4. | | |
| Chemistry | 1-methylpseudouridine | |
| Cap | 7mG(5′)ppp(5′)NlmpNp | |
| 5′UTR | GGGAAAUAAGAGAGAAAAGAAGAGUAAGAAGAAAUAUA | 2 |
| | AGACCCCGGCGCCGCCACC | |
| ORF of mRNA | AUGUUCGUGUUCCUGGUGCUGCUGCCCCUGGUGAGCAGC | 19 |
| Construct | CAGUGCGUGAACCUGACCACCCGGACCCAGCUGCCACCAG | |
| (excluding the stop | CCUACACCAACAGCUUCACCCGGGGCGUCUACUACCCCGA | |
| codon) | CAAGGUGUUCCGGAGCAGCGUCCUGCACAGCACCCAGGA | |
| | CCUGUUCCUGCCCUUCUUCAGCAACGUGACCUGGUUCCAC | |
| | GCCAUCCACGUGAGCGGCACCAACGGCACCAAGCGGUUCG | |
| | ACAACCCCGUGCUGCCCUUCAACGACGGCGUGUACUUCGC | |
| | CAGCACCGAGAAGAGCAACAUCAUCCGGGGCUGGAUCUU | |
| | CGGCACCACCCUGGACAGCAAGACCCAGAGCCUGCUGAUC | |
| | GUGAAUAACGCCACCAACGUGGUGAUCAAGGUGUGCGAG | |
| | UUCCAGUUCUGCAACGACCCCUUCCUGGGCGUGUACUACC | |
| | ACAAGAACAACAAGAGCUGGAUGGAGAGCGAGUUCCGGG | |
| | UGUACAGCAGCGCCAACAACUGCACCUUCGAGUACGUGA | |
| | GCCAGCCCUUCCUGAUGGACCUGGAGGGCAAGCAGGGCA | |
| | ACUUCAAGAACCUGCGGGAGUUCGUGUUCAAGAACAUCG | |
| | ACGGCUACUUCAAGAUCUACAGCAAGCACACCCCAAUCA | |
| | ACCUGGUGCGGGAUCUGCCCCAGGGCUUCUCAGCCCUGG | |
| | AGCCCCUGGUGGACCUGCCCAUCGGCAUCAACAUCACCCG | |
| | GUUCCAGACCCUGCUGGCCCUGCACCGGAGCUACCUGACC | |
| | CCAGGCGACAGCAGCAGCGGGUGGACAGCAGGCGCGGCU | |
| | GCUUACUACGUGGGCUACCUGCAGCCCCGGACCUUCCUGC | |
| | UGAAGUACAACGAGAACGGCACCAUCACCGACGCCGUGG | |
| | ACUGCGCCCUGGACCCUCUGAGCGAGACCAAGUGCACCCU | |
| | GAAGAGCUUCACCGUGGAGAAGGGCAUCUACCAGACCAG | |
| | CAACUUCCGGGUGCAGCCCACCGAGAGCAUCGUGCGGUU | |
| | CCCCAACAUCACCAACCUGUGCCCCUUCGGCGAGGUGUUC | |
| | AACGCCACCCGGUUCGCCAGCGUGUACGCCUGGAACCGGA | |
| | AGCGGAUCAGCAACUGCGUGGCCGACUACAGCGUGCUGU | |
| | ACAACAGCGCCAGCUUCAGCACCUUCAAGUGCUACGGCG | |
| | UGAGCCCCACCAAGCUGAACGACCUGUGCUUCACCAACGU | |
| | GUACGCCGACAGCUUCGUGAUCCGUGGCGACGAGGUGCG | |
| | GCAGAUCGCACCCGGCCAGACAGGCAAGAUCGCCGACUAC | |
| | AACUACAAGCUGCCCGACGACUUCACCGGCUGCGUGAUC | |
| | GCCUGGAACAGCAACAACCUCGACAGCAAGGUGGGCGGC | |
| | AACUACAACUACCUGUACCGGCUGUUCCGGAAGAGCAAC | |
| | CUGAAGCCCUUCGAGCGGGACAUCAGCACCGAGAUCUAC | |
| | CAAGCCGGCUCCACCCCUUGCAACGGCGUGGAGGGCUUCA | |
| | ACUGCUACUUCCCUCUGCAGAGCUACGGCUUCCAGCCCAC | |
| | CAACGGCGUGGGCUACCAGCCCUACCGGGUGGUGGUGCU | |
| | GAGCUUCGAGCUGCUGCACGCCCCAGCCACCGUGUGUGGC | |
| | CCCAAGAAGAGCACCAACCUGGUGAAGAACAAGUGCGUG | |
| | AACUUCAACUUCAACGGCCUUACCGGCACCGGCGUGCUG | |
| | ACCGAGAGCAACAAGAAAUUCCUGCCCUUUCAGCAGUUC | |
| | GGCCGGGACAUCGCCGACACCACCGACGCUGUGCGGGAUC | |
| | CCCAGACCCUGGAGAUCCUGGACAUCACCCCUUGCAGCUU | |
| | CGGCGGCGUGAGCGUGAUCACCCCAGGCACCAACACCAGC | |
| | AACCAGGUGGCCGUGCUGUACCAGGACGUGAACUGCACC | |
| | GAGGUGCCCGUGGCCAUCCACGCCGACCAGCUGACACCCA | |
| | CCUGGCGGGUCUACAGCACCGGCAGCAACGUGUUCCAGA | |
| | CCCGGGCCGGUUGCCUGAUCGGCGCCGAGCACGUGAACA | |
| | ACAGCUACGAGUGCGACAUCCCCAUCGGCGCCGGCAUCUG | |
| | UGCCAGCUACCAGACCCAGACCAAUUCACCCCGGAGGGCA | |
| | AGGAGCGUGGCCAGCCAGAGCAUCAUCGCCUACACCAUG | |
| | AGCCUGGGCGCCGAGAACAGCGUGGCCUACAGCAACAAC | |
| | AGCAUCGCCAUCCCCACCAACUUCACCAUCAGCGUGACCA | |
| | CCGAGAUUCUGCCCGUGAGCAUGACCAAGACCAGCGUGG | |
| | ACUGCACCAUGUACAUCUGCGGCGACAGCACCGAGUGCA | |
| | GCAACCUGCUGCUGCAGUACGGCAGCUUCUGCACCCAGCU | |
| | GAACCGGGCCCUGACCGGCAUCGCCGUGGAGCAGGACAA | |
| | GAACACCCAGGAGGUGUUCGCCCAGGUGAAGCAGAUCUA | |
| | CAAGACCCCUCCCAUCAAGGACUUCGGCGGCUUCAACUUC | |
| | AGCCAGAUCCUGCCCGACCCCAGCAAGCCCAGCAAGCGGA | |
| | GCUUCAUCGAGGACCUGCUGUUCAACAAGGUGACCCUAG | |
| | CCGACGCCGGCUUCAUCAAGCAGUACGGCGACUGCCUCGG | |
| | CGACAUAGCCGCCCGGGACCUGAUCUGCGCCCAGAAGUUC | |
| | AACGGCCUGACCGUGCUGCCUCCCCUGCUGACCGACGAGA | |
| | UGAUCGCCCAGUACACCAGCGCCCUGUUAGCCGGAACCAU | |
| | CACCAGCGGCUGGACUUUCGGCGCUGGAGCCGCUCUGCA | |
| | GAUCCCCUUCGCCAUGCAGAUGGCCUACCGGUUCAACGGC | |
| | AUCGGCGUGACCCAGAACGUGCUGUACGAGAACCAGAAG | |
| | CUGAUCGCCAACCAGUUCAACAGCGCCAUCGGCAAGAUCC | |
| | AGGACAGCCUGAGCAGCACCGCUAGCGCCCUGGGCAAGC | |
| | UGCAGGACGUGGUGAACCAGAACGCCCAGGCCCUGAACA | |
| | CCCUGGUGAAGCAGCUGAGCAGCAACUUCGGCGCCAUCA | |
| | GCAGCGUGCUGAACGACAUCCUGAGCCGGCUGGACCCUCC | |
| | CGAGGCCGAGGUGCAGAUCGACCGGCUGAUCACUGGCCG | |
| | GCUGCAGAGCCUGCAGACCUACGUGACCCAGCAGCUGAU | |
| | CCGGGCCGCCGAGAUUCGGGCCAGCGCCAACCUGGCCGCC | |
| | ACCAAGAUGAGCGAGUGCGUGCUGGGCCAGAGCAAGCGG | |
| | GUGGACUUCUGCGGCAAGGGCUACCACCUGAUGAGCUUU | |
| | CCCCAGAGCGCACCCCACGGAGUGGUGUUCCUGCACGUGA | |
| | CCUACGUGCCCGCCCAGGAGAAGAACUUCACCACCGCCCC | |
| | AGCCAUCUGCCACGACGGCAAGGCCCACUUUCCCCGGGAG | |
| | GGCGUGUUCGUGAGCAACGGCACCCACUGGUUCGUGACC | |
| | CAGCGGAACUUCUACGAGCCCCAGAUCAUCACCACCGACA | |
| | ACACCUUCGUGAGCGGCAACUGCGACGUGGUGAUCGGCA | |
| | UCGUGAACAACACCGUGUACGAUCCCCUGCAGCCCGAGCU | |
| | GGACAGCUUCAAGGAGGAGCUGGACAAGUACUUCAAGAA | |
| | UCACACCAGCCCCGACGUGGACCUGGGCGACAUCAGCGGC | |
| | AUCAACGCCAGCGUGGUGAACAUCCAGAAGGAGAUCGAU | |
| | CGGCUGAACGAGGUGGCCAAGAACCUGAACGAGAGCCUG | |
| | AUCGACCUGCAGGAGCUGGGCAAGUACGAGCAGUACAUC | |
| | AAGUGGCCCUGGUACAUCUGGCUGGGCUUCAUCGCCGGC | |
| | CUGAUCGCCAUCGUGAUGGUGACCAUCAUGCUG | |
| 3′UTR | UGAUAAUAGGCUGGAGCCUCGGUGGCCUAGCUUCUUGCC | 4 |
| | CCUUGGGCCUCCCCCCAGCCCCUCCUCCCCUUCCUGCACC | |
| | CGUACCCCCGUGGUCUUUGAAUAAAGUCUGAGUGGGCGG | |
| | C | |
| Corresponding amino | MFVFLVLLPLVSSQCVNLTTRTQLPPAYTNSFTRGVYYPDKVF | 20 |
| acid sequence | RSSVLHSTQDLFLPFFSNVTWFHAIHVSGTNGTKRFDNPVLPF | |
| | NDGVYFASTEKSNIIRGWIFGTTLDSKTQSLLIVNNATNVVIKV | |
| | CEFQFCNDPFLGVYYHKNNKSWMESEFRVYSSANNCTFEYVS | |
| | QPFLMDLEGKQGNFKNLREFVFKNIDGYFKIYSKHTPINLVRD | |
| | LPQGFSALEPLVDLPIGINITRFQTLLALHRSYLTPGDSSSGWT | |
| | AGAAAYYVGYLQPRTFLLKYNENGTITDAVDCALDPLSETKC | |
| | TLKSFTVEKGIYQTSNFRVQPTESIVRFPNITNLCPFGEVFNATR | |
| | FASVYAWNRKRISNCVADYSVLYNSASFSTFKCYGVSPTKLN | |
| | DLCFTNVYADSFVIRGDEVRQIAPGQTGKIADYNYKLPDDFTG | |
| | CVIAWNSNNLDSKVGGNYNYLYRLFRKSNLKPFERDISTEIYQ | |
| | AGSTPCNGVEGFNCYFPLQSYGFQPTNGVGYQPYRVVVLSFE | |
| | LLHAPATVCGPKKSTNLVKNKCVNFNFNGLTGTGVLTESNKK | |
| | FLPFQQFGRDIADTTDAVRDPQTLEILDITPCSFGGVSVITPGTN | |
| | TSNQVAVLYQDVNCTEVPVAIHADQLTPTWRVYSTGSNVFQT | |
| | RAGCLIGAEHVNNSYECDIPIGAGICASYQTQTNSPRRARSVA | |
| | SQSIIAYTMSLGAENSVAYSNNSIAIPTNFTISVTTEILPVSMTK | |
| | TSVDCTMYICGDSTECSNLLLQYGSFCTQLNRALTGIAVEQDK | |
| | NTQEVFAQVKQIYKTPPIKDFGGFNFSQILPDPSKPSKRSFIEDL | |
| | LFNKVTLADAGFIKQYGDCLGDIAARDLICAQKFNGLTVLPPL | |
| | LTDEMIAQYTSALLAGTITSGWTFGAGAALQIPFAMQMAYRF | |
| | NGIGVTQNVLYENQKLIANQFNSAIGKIQDSLSSTASALGKLQ | |
| | DVVNQNAQALNTLVKQLSSNFGAISSVLNDILSRLDPPEAEVQ | |
| | IDRLITGRLQSLQTYVTQQLIRAAEIRASANLAATKMSECVLG | |
| | QSKRVDFCGKGYHLMSFPQSAPHGVVFLHVTYVPAQEKNFTT | |
| | APAICHDGKAHFPREGVFVSNGTHWFVTQRNFYEPQIITTDNT | |
| | FVSGNCDVVIGIVNNTVYDPLQPELDSFKEELDKYFKNHTSPD | |
| | VDLGDISGINASVVNIQKEIDRLNEVAKNLNESLIDLQELGKYE | |
| | QYIKWPWYIWLGFIAGLIAIVMVTIML | |
| PolyA tail | 100 nt | |

SARS-CoV-2 S Protein Variant 7

| SEQ ID NO: 21 consists of from 5′ end to 3′ end: 5′ UTR SEQ ID NO: 2, mRNA ORF SEQ ID | | 21 |
|---|---|---|
| NO: 22, and 3′ UTR SEQ ID NO: 4. | | |
| Chemistry | 1-methylpseudouridine | |
| Cap | 7mG(5′)ppp(5′)NlmpNp | |
| 5′UTR | GGGAAAUAAGAGAGAAAAGAAGAGUAAGAAGAAAUAUA | 2 |
| | AGACCCCGGCGCCGCCACC | |
| ORF of mRNA | AUGUUCGUGUUCCUGGUGCUGCUGCCCCUGGUGAGCAGC | 22 |
| Construct | CAGUGCGUGAACCUGACCACCCGGACCCAGCUGCCACCAG | |
| (excluding the stop | CCUACACCAACAGCUUCACCCGGGGCGUCUACUACCCCGA | |
| codon) | CAAGGUGUUCCGGAGCAGCGUCCUGCACAGCACCCAGGA | |
| | CCUGUUCCUGCCCUUCUUCAGCAACGUGACCUGGUUCCAC | |
| | GCCAUCCACGUGAGCGGCACCAACGGCACCAAGCGGUUCG | |
| | ACAACCCCGUGCUGCCCUUCAACGACGGCGUGUACUUCGC | |
| | CAGCACCGAGAAGAGCAACAUCAUCCGGGGCUGGAUCUU | |
| | CGGCACCACCCUGGACAGCAAGACCCAGAGCCUGCUGAUC | |
| | GUGAAUAACGCCACCAACGUGGUGAUCAAGGUGUGCGAG | |
| | UUCCAGUUCUGCAACGACCCCUUCCUGGGCGUGUACUACC | |
| | ACAAGAACAACAAGAGCUGGAUGGAGAGCGAGUUCCGGG | |
| | UGUACAGCAGCGCCAACAACUGCACCUUCGAGUACGUGA | |
| | GCCAGCCCUUCCUGAUGGACCUGGAGGGCAAGCAGGGCA | |
| | ACUUCAAGAACCUGCGGGAGUUCGUGUUCAAGAACAUCG | |
| | ACGGCUACUUCAAGAUCUACAGCAAGCACACCCCAAUCA | |
| | ACCUGGUGCGGGAUCUGCCCCAGGGCUUCUCAGCCCUGG | |
| | AGCCCCUGGUGGACCUGCCCAUCGGCAUCAACAUCACCCG | |
| | GUUCCAGACCCUGCUGGCCCUGCACCGGAGCUACCUGACC | |
| | CCAGGCGACAGCAGCAGCGGGUGGACAGCAGGCGCGGCU | |
| | GCUUACUACGUGGGCUACCUGCAGCCCCGGACCUUCCUGC | |
| | UGAAGUACAACGAGAACGGCACCAUCACCGACGCCGUGG | |
| | ACUGCGCCCUGGACCCUCUGAGCGAGACCAAGUGCACCCU | |
| | GAAGAGCUUCACCGUGGAGAAGGGCAUCUACCAGACCAG | |
| | CAACUUCCGGGUGCAGCCCACCGAGAGCAUCGUGCGGUU | |
| | CCCCAACAUCACCAACCUGUGCCCCUUCGGCGAGGUGUUC | |
| | AACGCCACCCGGUUCGCCAGCGUGUACGCCUGGAACCGGA | |
| | AGCGGAUCAGCAACUGCGUGGCCGACUACAGCGUGCUGU | |
| | ACAACAGCGCCAGCUUCAGCACCUUCAAGUGCUACGGCG | |
| | UGAGCCCCACCAAGCUGAACGACCUGUGCUUCACCAACGU | |
| | GUACGCCGACAGCUUCGUGAUCCGUGGCGACGAGGUGCG | |
| | GCAGAUCGCACCCGGCCAGACAGGCAAGAUCGCCGACUAC | |
| | AACUACAAGCUGCCCGACGACUUCACCGGCUGCGUGAUC | |
| | GCCUGGAACAGCAACAACCUCGACAGCAAGGUGGGCGGC | |
| | AACUACAACUACCUGUACCGGCUGUUCCGGAAGAGCAAC | |
| | CUGAAGCCCUUCGAGCGGGACAUCAGCACCGAGAUCUAC | |
| | CAAGCCGGCUCCACCCCUUGCAACGGCGUGGAGGGCUUCA | |
| | ACUGCUACUUCCCUCUGCAGAGCUACGGCUUCCAGCCCAC | |
| | CAACGGCGUGGGCUACCAGCCCUACCGGGUGGUGGUGCU | |
| | GAGCUUCGAGCUGCUGCACGCCCCAGCCACCGUGUGUGGC | |
| | CCCAAGAAGAGCACCAACCUGGUGAAGAACAAGUGCGUG | |
| | AACUUCAACUUCAACGGCCUUACCGGCACCGGCGUGCUG | |
| | ACCGAGAGCAACAAGAAAUUCCUGCCCUUUCAGCAGUUC | |
| | GGCCGGGACAUCGCCGACACCACCGACGCUGUGCGGGAUC | |
| | CCCAGACCCUGGAGAUCCUGGACAUCACCCCUUGCAGCUU | |
| | CGGCGGCGUGAGCGUGAUCACCCCAGGCACCAACACCAGC | |
| | AACCAGGUGGCCGUGCUGUACCAGGACGUGAACUGCACC | |
| | GAGGUGCCCGUGGCCAUCCACGCCGACCAGCUGACACCCA | |
| | CCUGGCGGGUCUACAGCACCGGCAGCAACGUGUUCCAGA | |
| | CCCGGGCCGGUUGCCUGAUCGGCGCCGAGCACGUGAACA | |
| | ACAGCUACGAGUGCGACAUCCCCAUCGGCGCCGGCAUCUG | |
| | UGCCAGCUACCAGACCCAGACCGUGUCACUGAGGAGCGU | |
| | GGCCAGCCAGAGCAUCAUCGCCUACACCAUGAGCCUGGGC | |
| | GCCGAGAACAGCGUGGCCUACAGCAACAACAGCAUCGCC | |
| | AUCCCCACCAACUUCACCAUCAGCGUGACCACCGAGAUUC | |
| | UGCCCGUGAGCAUGACCAAGACCAGCGUGGACUGCACCA | |
| | UGUACAUCUGCGGCGACAGCACCGAGUGCAGCAACCUGC | |
| | UGCUGCAGUACGGCAGCUUCUGCACCCAGCUGAACCGGG | |
| | CCCUGACCGGCAUCGCCGUGGAGCAGGACAAGAACACCCA | |
| | GGAGGUGUUCGCCCAGGUGAAGCAGAUCUACAAGACCCC | |
| | UCCCAUCAAGGACUUCGGCGGCUUCAACUUCAGCCAGAU | |
| | CCUGCCCGACCCCAGCAAGCCCAGCAAGCGGAGCUUCAUC | |
| | GAGGACCUGCUGUUCAACAAGGUGACCCUAGCCGACGCC | |
| | GGCUUCAUCAAGCAGUACGGCGACUGCCUCGGCGACAUA | |
| | GCCGCCCGGGACCUGAUCUGCGCCCAGAAGUUCAACGGCC | |
| | UGACCGUGCUGCCUCCCCUGCUGACCGACGAGAUGAUCGC | |
| | CCAGUACACCAGCGCCCUGUUAGCCGGAACCAUCACCAGC | |
| | GGCUGGACUUUCGGCGCUGGAGCCGCUCUGCAGAUCCCC | |
| | UUCGCCAUGCAGAUGGCCUACCGGUUCAACGGCAUCGGC | |
| | GUGACCCAGAACGUGCUGUACGAGAACCAGAAGCUGAUC | |
| | GCCAACCAGUUCAACAGCGCCAUCGGCAAGAUCCAGGAC | |
| | AGCCUGAGCAGCACCGCUAGCGCCCUGGGCAAGCUGCAG | |
| | GACGUGGUGAACCAGAACGCCCAGGCCCUGAACACCCUG | |
| | GUGAAGCAGCUGAGCAGCAACUUCGGCGCCAUCAGCAGC | |
| | GUGCUGAACGACAUCCUGAGCCGGCUGGACAAGGUGGAG | |
| | GCCGAGGUGCAGAUCGACCGGCUGAUCACUGGCCGGCUG | |
| | CAGAGCCUGCAGACCUACGUGACCCAGCAGCUGAUCCGG | |
| | GCCGCCGAGAUUCGGGCCAGCGCCAACCUGGCCGCCACCA | |
| | AGAUGAGCGAGUGCGUGCUGGGCCAGAGCAAGCGGGUGG | |
| | ACUUCUGCGGCAAGGGCUACCACCUGAUGAGCUUUCCCC | |
| | AGAGCGCACCCCACGGAGUGGUGUUCCUGCACGUGACCU | |
| | ACGUGCCCGCCCAGGAGAAGAACUUCACCACCGCCCCAGC | |
| | CAUCUGCCACGACGGCAAGGCCCACUUUCCCCGGGAGGGC | |
| | GUGUUCGUGAGCAACGGCACCCACUGGUUCGUGACCCAG | |
| | CGGAACUUCUACGAGCCCCAGAUCAUCACCACCGACAACA | |
| | CCUUCGUGAGCGGCAACUGCGACGUGGUGAUCGGCAUCG | |
| | UGAACAACACCGUGUACGAUCCCCUGCAGCCCGAGCUGG | |
| | ACAGCUUCAAGGAGGAGCUGGACAAGUACUUCAAGAAUC | |
| | ACACCAGCCCCGACGUGGACCUGGGCGACAUCAGCGGCAU | |
| | CAACGCCAGCGUGGUGAACAUCCAGAAGGAGAUCGAUCG | |
| | GCUGAACGAGGUGGCCAAGAACCUGAACGAGAGCCUGAU | |
| | CGACCUGCAGGAGCUGGGCAAGUACGAGCAGUACAUCAA | |
| | GUGGCCCUGGUACAUCUGGCUGGGCUUCAUCGCCGGCCU | |
| | GAUCGCCAUCGUGAUGGUGACCAUCAUGCUGUGCUGCAU | |
| | GACCAGCUGCUGCAGCUGCCUGAAGGGCUGUUGCAGCUG | |
| | CGGCAGCUGCUGCAAGUUCGACGAGGACGACAGCGAGCC | |
| | CGUGCUGAAGGGCGUGAAGCUGCACUACACC | |
| 3′UTR | UGAUAAUAGGCUGGAGCCUCGGUGGCCUAGCUUCUUGCC | 4 |
| | CCUUGGGCCUCCCCCCAGCCCCUCCUCCCCUUCCUGCACC | |
| | CGUACCCCCGUGGUCUUUGAAUAAAGUCUGAGUGGGCGG | |
| | C | |
| Corresponding amino | MFVFLVLLPLVSSQCVNLTTRTQLPPAYTNSFTRGVYYPDKVF | 23 |
| acid sequence | RSSVLHSTQDLFLPFFSNVTWFHAIHVSGTNGTKRFDNPVLPF | |
| | NDGVYFASTEKSNIIRGWIFGTTLDSKTQSLLIVNNATNVVIKV | |
| | CEFQFCNDPFLGVYYHKNNKSWMESEFRVYSSANNCTFEYVS | |
| | QPFLMDLEGKQGNFKNLREFVFKNIDGYFKIYSKHTPINLVRD | |
| | LPQGFSALEPLVDLPIGINITRFQTLLALHRSYLTPGDSSSGWT | |
| | AGAAAYYVGYLQPRTFLLKYNENGTITDAVDCALDPLSETKC | |
| | TLKSFTVEKGIYQTSNFRVQPTESIVRFPNITNLCPFGEVFNATR | |
| | FASVYAWNRKRISNCVADYSVLYNSASFSTFKCYGVSPTKLN | |
| | DLCFTNVYADSFVIRGDEVRQIAPGQTGKIADYNYKLPDDFTG | |
| | CVIAWNSNNLDSKVGGNYNYLYRLFRKSNLKPFERDISTEIYQ | |
| | AGSTPCNGVEGFNCYFPLQSYGFQPTNGVGYQPYRVVVLSFE | |
| | LLHAPATVCGPKKSTNLVKNKCVNFNFNGLTGTGVLTESNKK | |
| | FLPFQQFGRDIADTTDAVRDPQTLEILDITPCSFGGVSVITPGTN | |
| | TSNQVAVLYQDVNCTEVPVAIHADQLTPTWRVYSTGSNVFQT | |
| | RAGCLIGAEHVNNSYECDIPIGAGICASYQTQTVSLRSVASQSII | |
| | AYTMSLGAENSVAYSNNSIAIPTNFTISVTTEILPVSMTKTSVD | |
| | CTMYICGDSTECSNLLLQYGSFCTQLNRALTGIAVEQDKNTQE | |
| | VFAQVKQIYKTPPIKDFGGFNFSQILPDPSKPSKRSFIEDLLFNK | |
| | VTLADAGFIKQYGDCLGDIAARDLICAQKFNGLTVLPPLLTDE | |
| | MIAQYTSALLAGTITSGWTFGAGAALQIPFAMQMAYRFNGIG | |
| | VTQNVLYENQKLIANQFNSAIGKIQDSLSSTASALGKLQDVVN | |
| | QNAQALNTLVKQLSSNFGAISSVLNDILSRLDKVEAEVQIDRLI | |
| | TGRLQSLQTYVTQQLIRAAEIRASANLAATKMSECVLGQSKR | |
| | VDFCGKGYHLMSFPQSAPHGVVFLHVTYVPAQEKNFTTAPAI | |
| | CHDGKAHFPREGVFVSNGTHWFVTQRNFYEPQIITTDNTFVSG | |
| | NCDVVIGIVNNTVYDPLQPELDSFKEELDKYFKNHTSPDVDLG | |
| | DISGINASVVNIQKEIDRLNEVAKNLNESLIDLQELGKYEQYIK | |
| | WPWYIWLGFIAGLIAIVMVTIMLCCMTSCCSCLKGCCSCGSCC | |
| | KFDEDDSEPVLKGVKLHYT | |
| PolyA tail | 100 nt | |

SARS-CoV-2 S Protein Variant 8

| SEQ ID NO: 24 consists of from 5′ end to 3′ end: 5′ UTR SEQ ID NO: 2, mRNA ORF SEQ ID | | 24 |
|---|---|---|
| NO: 25, and 3′ UTR SEQ ID NO: 4. | | |
| Chemistry | 1-methylpseudouridine | |
| Cap | 7mG(5′)ppp(5′)NlmpNp | |
| 5′UTR | GGGAAAUAAGAGAGAAAAGAAGAGUAAGAAGAAAUAUA | 2 |
| | AGACCCCGGCGCCGCCACC | |
| ORF of mRNA | AUGUUCGUGUUCCUGGUGCUGCUGCCCCUGGUGAGCAGC | 25 |
| Construct | CAGUGCGUGAACCUGACCACCCGGACCCAGCUGCCACCAG | |
| (excluding the stop | CCUACACCAACAGCUUCACCCGGGGCGUCUACUACCCCGA | |
| codon) | CAAGGUGUUCCGGAGCAGCGUCCUGCACAGCACCCAGGA | |
| | CCUGUUCCUGCCCUUCUUCAGCAACGUGACCUGGUUCCAC | |
| | GCCAUCCACGUGAGCGGCACCAACGGCACCAAGCGGUUCG | |
| | ACAACCCCGUGCUGCCCUUCAACGACGGCGUGUACUUCGC | |
| | CAGCACCGAGAAGAGCAACAUCAUCCGGGGCUGGAUCUU | |
| | CGGCACCACCCUGGACAGCAAGACCCAGAGCCUGCUGAUC | |
| | GUGAAUAACGCCACCAACGUGGUGAUCAAGGUGUGCGAG | |
| | UUCCAGUUCUGCAACGACCCCUUCCUGGGCGUGUACUACC | |
| | ACAAGAACAACAAGAGCUGGAUGGAGAGCGAGUUCCGGG | |
| | UGUACAGCAGCGCCAACAACUGCACCUUCGAGUACGUGA | |
| | GCCAGCCCUUCCUGAUGGACCUGGAGGGCAAGCAGGGCA | |
| | ACUUCAAGAACCUGCGGGAGUUCGUGUUCAAGAACAUCG | |
| | ACGGCUACUUCAAGAUCUACAGCAAGCACACCCCAAUCA | |
| | ACCUGGUGCGGGAUCUGCCCCAGGGCUUCUCAGCCCUGG | |
| | AGCCCCUGGUGGACCUGCCCAUCGGCAUCAACAUCACCCG | |
| | GUUCCAGACCCUGCUGGCCCUGCACCGGAGCUACCUGACC | |
| | CCAGGCGACAGCAGCAGCGGGUGGACAGCAGGCGCGGCU | |
| | GCUUACUACGUGGGCUACCUGCAGCCCCGGACCUUCCUGC | |
| | UGAAGUACAACGAGAACGGCACCAUCACCGACGCCGUGG | |
| | ACUGCGCCCUGGACCCUCUGAGCGAGACCAAGUGCACCCU | |
| | GAAGAGCUUCACCGUGGAGAAGGGCAUCUACCAGACCAG | |
| | CAACUUCCGGGUGCAGCCCACCGAGAGCAUCGUGCGGUU | |
| | CCCCAACAUCACCAACCUGUGCCCCUUCGGCGAGGUGUUC | |
| | AACGCCACCCGGUUCGCCAGCGUGUACGCCUGGAACCGGA | |
| | AGCGGAUCAGCAACUGCGUGGCCGACUACAGCGUGCUGU | |
| | ACAACAGCGCCAGCUUCAGCACCUUCAAGUGCUACGGCG | |
| | UGAGCCCCACCAAGCUGAACGACCUGUGCUUCACCAACGU | |
| | GUACGCCGACAGCUUCGUGAUCCGUGGCGACGAGGUGCG | |
| | GCAGAUCGCACCCGGCCAGACAGGCAAGAUCGCCGACUAC | |
| | AACUACAAGCUGCCCGACGACUUCACCGGCUGCGUGAUC | |
| | GCCUGGAACAGCAACAACCUCGACAGCAAGGUGGGCGGC | |
| | AACUACAACUACCUGUACCGGCUGUUCCGGAAGAGCAAC | |
| | CUGAAGCCCUUCGAGCGGGACAUCAGCACCGAGAUCUAC | |
| | CAAGCCGGCUCCACCCCUUGCAACGGCGUGGAGGGCUUCA | |
| | ACUGCUACUUCCCUCUGCAGAGCUACGGCUUCCAGCCCAC | |
| | CAACGGCGUGGGCUACCAGCCCUACCGGGUGGUGGUGCU | |
| | GAGCUUCGAGCUGCUGCACGCCCCAGCCACCGUGUGUGGC | |
| | CCCAAGAAGAGCACCAACCUGGUGAAGAACAAGUGCGUG | |
| | AACUUCAACUUCAACGGCCUUACCGGCACCGGCGUGCUG | |
| | ACCGAGAGCAACAAGAAAUUCCUGCCCUUUCAGCAGUUC | |
| | GGCCGGGACAUCGCCGACACCACCGACGCUGUGCGGGAUC | |
| | CCCAGACCCUGGAGAUCCUGGACAUCACCCCUUGCAGCUU | |
| | CGGCGGCGUGAGCGUGAUCACCCCAGGCACCAACACCAGC | |
| | AACCAGGUGGCCGUGCUGUACCAGGACGUGAACUGCACC | |
| | GAGGUGCCCGUGGCCAUCCACGCCGACCAGCUGACACCCA | |
| | CCUGGCGGGUCUACAGCACCGGCAGCAACGUGUUCCAGA | |
| | CCCGGGCCGGUUGCCUGAUCGGCGCCGAGCACGUGAACA | |
| | ACAGCUACGAGUGCGACAUCCCCAUCGGCGCCGGCAUCUG | |
| | UGCCAGCUACCAGACCCAGACCAAUUCACCCCGGAGGGCA | |
| | AGGAGCGUGGCCAGCCAGAGCAUCAUCGCCUACACCAUG | |
| | AGCCUGGGCGCCGAGAACAGCGUGGCCUACAGCAACAAC | |
| | AGCAUCGCCAUCCCCACCAACUUCACCAUCAGCGUGACCA | |
| | CCGAGAUUCUGCCCGUGAGCAUGACCAAGACCAGCGUGG | |
| | ACUGCACCAUGUACAUCUGCGGCGACAGCACCGAGUGCA | |
| | GCAACCUGCUGCUGCAGUACGGCAGCUUCUGCACCCAGCU | |
| | GAACCGGGCCCUGACCGGCAUCGCCGUGGAGCAGGACAA | |
| | GAACACCCAGGAGGUGUUCGCCCAGGUGAAGCAGAUCUA | |
| | CAAGACCCCUCCCAUCAAGGACUUCGGCGGCUUCAACUUC | |
| | AGCCAGAUCCUGCCCGACCCCAGCAAGCCCAGCAAGCGGA | |
| | GCUUCAUCGAGGACCUGCUGUUCAACAAGGUGACCCUAG | |
| | CCGACGCCGGCUUCAUCAAGCAGUACGGCGACUGCCUCGG | |
| | CGACAUAGCCGCCCGGGACCUGAUCUGCGCCCAGAAGUUC | |
| | AACGGCCUGACCGUGCUGCCUCCCCUGCUGACCGACGAGA | |
| | UGAUCGCCCAGUACACCAGCGCCCUGUUAGCCGGAACCAU | |
| | CACCAGCGGCUGGACUUUCGGCGCUGGAGCCGCUCUGCA | |
| | GAUCCCCUUCGCCAUGCAGAUGGCCUACCGGUUCAACGGC | |
| | AUCGGCGUGACCCAGAACGUGCUGUACGAGAACCAGAAG | |
| | CUGAUCGCCAACCAGUUCAACAGCGCCAUCGGCAAGAUCC | |
| | AGGACAGCCUGAGCAGCACCGCUAGCGCCCUGGGCAAGC | |
| | UGCAGGACGUGGUGAACCAGAACGCCCAGGCCCUGAACA | |
| | CCCUGGUGAAGCAGCUGAGCAGCAACUUCGGCGCCAUCA | |
| | GCAGCGUGCUGAACGACAUCCUGAGCCGGCUGGACAAGG | |
| | UGGAGGCCGAGGUGCAGAUCGACCGGCUGAUCACUGGCC | |
| | GGCUGCAGAGCCUGCAGACCUACGUGACCCAGCAGCUGA | |
| | UCCGGGCCGCCGAGAUUCGGGCCAGCGCCAACCUGGCCGC | |
| | CACCAAGAUGAGCGAGUGCGUGCUGGGCCAGAGCAAGCG | |
| | GGUGGACUUCUGCGGCAAGGGCUACCACCUGAUGAGCUU | |
| | UCCCCAGAGCGCACCCCACGGAGUGGUGUUCCUGCACGUG | |
| | ACCUACGUGCCCGCCCAGGAGAAGAACUUCACCACCGCCC | |
| | CAGCCAUCUGCCACGACGGCAAGGCCCACUUUCCCCGGGA | |
| | GGGCGUGUUCGUGAGCAACGGCACCCACUGGUUCGUGAC | |
| | CCAGCGGAACUUCUACGAGCCCCAGAUCAUCACCACCGAC | |
| | AACACCUUCGUGAGCGGCAACUGCGACGUGGUGAUCGGC | |
| | AUCGUGAACAACACCGUGUACGAUCCCCUGCAGCCCGAGC | |
| | UGGACAGCUUCAAGGAGGAGCUGGACAAGUACUUCAAGA | |
| | AUCACACCAGCCCCGACGUGGACCUGGGCGACAUCAGCGG | |
| | CAUCAACGCCAGCGUGGUGAACAUCCAGAAGGAGAUCGA | |
| | UCGGCUGAACGAGGUGGCCAAGAACCUGAACGAGAGCCU | |
| | GAUCGACCUGCAGGAGCUGGGCAAGUACGAGCAGUACAU | |
| | CAAGUGGCCCUGGUACAUCUGGCUGGGCUUCAUCGCCGG | |
| | CCUGAUCGCCAUCGUGAUGGUGACCAUCAUGCUGUGCUG | |
| | CAUGACCAGCUGCUGCAGCUGCCUGAAGGGCUGUUGCAG | |
| | CUGCGGCAGCUGCUGCAAGUUCGACGAGGACGACAGCGA | |
| | GCCCGUGCUGAAGGGCGUG | |
| 3′UTR | UGAUAAUAGGCUGGAGCCUCGGUGGCCUAGCUUCUUGCC | 4 |
| | CCUUGGGCCUCCCCCCAGCCCCUCCUCCCCUUCCUGCACC | |
| | CGUACCCCCGUGGUCUUUGAAUAAAGUCUGAGUGGGCGG | |
| | C | |
| Corresponding amino | MFVFLVLLPLVSSQCVNLTTRTQLPPAYTNSFTRGVYYPDKVF | 26 |
| acid sequence | RSSVLHSTQDLFLPFFSNVTWFHAIHVSGTNGTKRFDNPVLPF | |
| | NDGVYFASTEKSNIIRGWIFGTTLDSKTQSLLIVNNATNVVIKV | |
| | CEFQFCNDPFLGVYYHKNNKSWMESEFRVYSSANNCTFEYVS | |
| | QPFLMDLEGKQGNFKNLREFVFKNIDGYFKIYSKHTPINLVRD | |
| | LPQGFSALEPLVDLPIGINITRFQTLLALHRSYLTPGDSSSGWT | |
| | AGAAAYYVGYLQPRTFLLKYNENGTITDAVDCALDPLSETKC | |
| | TLKSFTVEKGIYQTSNFRVQPTESIVRFPNITNLCPFGEVFNATR | |
| | FASVYAWNRKRISNCVADYSVLYNSASFSTFKCYGVSPTKLN | |
| | DLCFTNVYADSFVIRGDEVRQIAPGQTGKIADYNYKLPDDFTG | |
| | CVIAWNSNNLDSKVGGNYNYLYRLFRKSNLKPFERDISTEIYQ | |
| | AGSTPCNGVEGFNCYFPLQSYGFQPTNGVGYQPYRVVVLSFE | |
| | LLHAPATVCGPKKSTNLVKNKCVNFNFNGLTGTGVLTESNKK | |
| | FLPFQQFGRDIADTTDAVRDPQTLEILDITPCSFGGVSVITPGTN | |
| | TSNQVAVLYQDVNCTEVPVAIHADQLTPTWRVYSTGSNVFQT | |
| | RAGCLIGAEHVNNSYECDIPIGAGICASYQTQTNSPRRARSVA | |
| | SQSIIAYTMSLGAENSVAYSNNSIAIPTNFTISVTTEILPVSMTK | |
| | TSVDCTMYICGDSTECSNLLLQYGSFCTQLNRALTGIAVEQDK | |
| | NTQEVFAQVKQIYKTPPIKDFGGFNFSQILPDPSKPSKRSFIEDL | |
| | LFNKVTLADAGFIKQYGDCLGDIAARDLICAQKFNGLTVLPPL | |
| | LTDEMIAQYTSALLAGTITSGWTFGAGAALQIPFAMQMAYRF | |
| | NGIGVTQNVLYENQKLIANQFNSAIGKIQDSLSSTASALGKLQ | |
| | DVVNQNAQALNTLVKQLSSNFGAISSVLNDILSRLDKVEAEV | |
| | QIDRLITGRLQSLQTYVTQQLIRAAEIRASANLAATKMSECVL | |
| | GQSKRVDFCGKGYHLMSFPQSAPHGVVFLHVTYVPAQEKNF | |
| | TTAPAICHDGKAHFPREGVFVSNGTHWFVTQRNFYEPQIITTD | |
| | NTFVSGNCDVVIGIVNNTVYDPLQPELDSFKEELDKYFKNHTS | |
| | PDVDLGDISGINASVVNIQKEIDRLNEVAKNLNESLIDLQELGK | |
| | YEQYIKWPWYIWLGFIAGLIAIVMVTIMLCCMTSCCSCLKGCC | |
| | SCGSCCKFDEDDSEPVLKGV | |
| PolyA tail | 100 nt | |

SARS-CoV-2 S Protein Variant 9

| SEQ ID NO: 27 consists of from 5′ end to 3′ end: 5′ UTR SEQ ID NO: 2, mRNA ORF SEQ ID | | 27 |
|---|---|---|
| NO: 28, and 3′ UTR SEQ ID NO: 4. | | |
| Chemistry | 1-methylpseudouridine; SEQ ID NO: 105 corresponds to fully | 105 |
| | modified RNA sequence including 5′ UTR, mRNA ORF, and 3′UTR; | 106 |
| | SEQ ID NO: 106 corresponds to fully modified ORF of mRNA | |
| | construct. | |
| Cap | 7mG(5′)ppp(5′)NlmpNp | |
| 5′UTR | GGGAAAUAAGAGAGAAAAGAAGAGUAAGAAGAAAUAUA | 2 |
| | AGACCCCGGCGCCGCCACC | |
| ORF of mRNA | AUGUUCGUGUUCCUGGUGCUGCUGCCCCUGGUGAGCAGC | 28 |
| Construct | CAGUGCGUGAACCUGACCACCCGGACCCAGCUGCCACCAG | |
| (excluding the stop | CCUACACCAACAGCUUCACCCGGGGCGUCUACUACCCCGA | |
| codon) | CAAGGUGUUCCGGAGCAGCGUCCUGCACAGCACCCAGGA | |
| | CCUGUUCCUGCCCUUCUUCAGCAACGUGACCUGGUUCCAC | |
| | GCCAUCCACGUGAGCGGCACCAACGGCACCAAGCGGUUCG | |
| | ACAACCCCGUGCUGCCCUUCAACGACGGCGUGUACUUCGC | |
| | CAGCACCGAGAAGAGCAACAUCAUCCGGGGCUGGAUCUU | |
| | CGGCACCACCCUGGACAGCAAGACCCAGAGCCUGCUGAUC | |
| | GUGAAUAACGCCACCAACGUGGUGAUCAAGGUGUGCGAG | |
| | UUCCAGUUCUGCAACGACCCCUUCCUGGGCGUGUACUACC | |
| | ACAAGAACAACAAGAGCUGGAUGGAGAGCGAGUUCCGGG | |
| | UGUACAGCAGCGCCAACAACUGCACCUUCGAGUACGUGA | |
| | GCCAGCCCUUCCUGAUGGACCUGGAGGGCAAGCAGGGCA | |
| | ACUUCAAGAACCUGCGGGAGUUCGUGUUCAAGAACAUCG | |
| | ACGGCUACUUCAAGAUCUACAGCAAGCACACCCCAAUCA | |
| | ACCUGGUGCGGGAUCUGCCCCAGGGCUUCUCAGCCCUGG | |
| | AGCCCCUGGUGGACCUGCCCAUCGGCAUCAACAUCACCCG | |
| | GUUCCAGACCCUGCUGGCCCUGCACCGGAGCUACCUGACC | |
| | CCAGGCGACAGCAGCAGCGGGUGGACAGCAGGCGCGGCU | |
| | GCUUACUACGUGGGCUACCUGCAGCCCCGGACCUUCCUGC | |
| | UGAAGUACAACGAGAACGGCACCAUCACCGACGCCGUGG | |
| | ACUGCGCCCUGGACCCUCUGAGCGAGACCAAGUGCACCCU | |
| | GAAGAGCUUCACCGUGGAGAAGGGCAUCUACCAGACCAG | |
| | CAACUUCCGGGUGCAGCCCACCGAGAGCAUCGUGCGGUU | |
| | CCCCAACAUCACCAACCUGUGCCCCUUCGGCGAGGUGUUC | |
| | AACGCCACCCGGUUCGCCAGCGUGUACGCCUGGAACCGGA | |
| | AGCGGAUCAGCAACUGCGUGGCCGACUACAGCGUGCUGU | |
| | ACAACAGCGCCAGCUUCAGCACCUUCAAGUGCUACGGCG | |
| | UGAGCCCCACCAAGCUGAACGACCUGUGCUUCACCAACGU | |
| | GUACGCCGACAGCUUCGUGAUCCGUGGCGACGAGGUGCG | |
| | GCAGAUCGCACCCGGCCAGACAGGCAAGAUCGCCGACUAC | |
| | AACUACAAGCUGCCCGACGACUUCACCGGCUGCGUGAUC | |
| | GCCUGGAACAGCAACAACCUCGACAGCAAGGUGGGCGGC | |
| | AACUACAACUACCUGUACCGGCUGUUCCGGAAGAGCAAC | |
| | CUGAAGCCCUUCGAGCGGGACAUCAGCACCGAGAUCUAC | |
| | CAAGCCGGCUCCACCCCUUGCAACGGCGUGGAGGGCUUCA | |
| | ACUGCUACUUCCCUCUGCAGAGCUACGGCUUCCAGCCCAC | |
| | CAACGGCGUGGGCUACCAGCCCUACCGGGUGGUGGUGCU | |
| | GAGCUUCGAGCUGCUGCACGCCCCAGCCACCGUGUGUGGC | |
| | CCCAAGAAGAGCACCAACCUGGUGAAGAACAAGUGCGUG | |
| | AACUUCAACUUCAACGGCCUUACCGGCACCGGCGUGCUG | |
| | ACCGAGAGCAACAAGAAAUUCCUGCCCUUUCAGCAGUUC | |
| | GGCCGGGACAUCGCCGACACCACCGACGCUGUGCGGGAUC | |
| | CCCAGACCCUGGAGAUCCUGGACAUCACCCCUUGCAGCUU | |
| | CGGCGGCGUGAGCGUGAUCACCCCAGGCACCAACACCAGC | |
| | AACCAGGUGGCCGUGCUGUACCAGGACGUGAACUGCACC | |
| | GAGGUGCCCGUGGCCAUCCACGCCGACCAGCUGACACCCA | |
| | CCUGGCGGGUCUACAGCACCGGCAGCAACGUGUUCCAGA | |
| | CCCGGGCCGGUUGCCUGAUCGGCGCCGAGCACGUGAACA | |
| | ACAGCUACGAGUGCGACAUCCCCAUCGGCGCCGGCAUCUG | |
| | UGCCAGCUACCAGACCCAGACCAAUUCACCCCGGAGGGCA | |
| | AGGAGCGUGGCCAGCCAGAGCAUCAUCGCCUACACCAUG | |
| | AGCCUGGGCGCCGAGAACAGCGUGGCCUACAGCAACAAC | |
| | AGCAUCGCCAUCCCCACCAACUUCACCAUCAGCGUGACCA | |
| | CCGAGAUUCUGCCCGUGAGCAUGACCAAGACCAGCGUGG | |
| | ACUGCACCAUGUACAUCUGCGGCGACAGCACCGAGUGCA | |
| | GCAACCUGCUGCUGCAGUACGGCAGCUUCUGCACCCAGCU | |
| | GAACCGGGCCCUGACCGGCAUCGCCGUGGAGCAGGACAA | |
| | GAACACCCAGGAGGUGUUCGCCCAGGUGAAGCAGAUCUA | |
| | CAAGACCCCUCCCAUCAAGGACUUCGGCGGCUUCAACUUC | |
| | AGCCAGAUCCUGCCCGACCCCAGCAAGCCCAGCAAGCGGA | |
| | GCUUCAUCGAGGACCUGCUGUUCAACAAGGUGACCCUAG | |
| | CCGACGCCGGCUUCAUCAAGCAGUACGGCGACUGCCUCGG | |
| | CGACAUAGCCGCCCGGGACCUGAUCUGCGCCCAGAAGUUC | |
| | AACGGCCUGACCGUGCUGCCUCCCCUGCUGACCGACGAGA | |
| | UGAUCGCCCAGUACACCAGCGCCCUGUUAGCCGGAACCAU | |
| | CACCAGCGGCUGGACUUUCGGCGCUGGAGCCGCUCUGCA | |
| | GAUCCCCUUCGCCAUGCAGAUGGCCUACCGGUUCAACGGC | |
| | AUCGGCGUGACCCAGAACGUGCUGUACGAGAACCAGAAG | |
| | CUGAUCGCCAACCAGUUCAACAGCGCCAUCGGCAAGAUCC | |
| | AGGACAGCCUGAGCAGCACCGCUAGCGCCCUGGGCAAGC | |
| | UGCAGGACGUGGUGAACCAGAACGCCCAGGCCCUGAACA | |
| | CCCUGGUGAAGCAGCUGAGCAGCAACUUCGGCGCCAUCA | |
| | GCAGCGUGCUGAACGACAUCCUGAGCCGGCUGGACCCUCC | |
| | CGAGGCCGAGGUGCAGAUCGACCGGCUGAUCACUGGCCG | |
| | GCUGCAGAGCCUGCAGACCUACGUGACCCAGCAGCUGAU | |
| | CCGGGCCGCCGAGAUUCGGGCCAGCGCCAACCUGGCCGCC | |
| | ACCAAGAUGAGCGAGUGCGUGCUGGGCCAGAGCAAGCGG | |
| | GUGGACUUCUGCGGCAAGGGCUACCACCUGAUGAGCUUU | |
| | CCCCAGAGCGCACCCCACGGAGUGGUGUUCCUGCACGUGA | |
| | CCUACGUGCCCGCCCAGGAGAAGAACUUCACCACCGCCCC | |
| | AGCCAUCUGCCACGACGGCAAGGCCCACUUUCCCCGGGAG | |
| | GGCGUGUUCGUGAGCAACGGCACCCACUGGUUCGUGACC | |
| | CAGCGGAACUUCUACGAGCCCCAGAUCAUCACCACCGACA | |
| | ACACCUUCGUGAGCGGCAACUGCGACGUGGUGAUCGGCA | |
| | UCGUGAACAACACCGUGUACGAUCCCCUGCAGCCCGAGCU | |
| | GGACAGCUUCAAGGAGGAGCUGGACAAGUACUUCAAGAA | |
| | UCACACCAGCCCCGACGUGGACCUGGGCGACAUCAGCGGC | |
| | AUCAACGCCAGCGUGGUGAACAUCCAGAAGGAGAUCGAU | |
| | CGGCUGAACGAGGUGGCCAAGAACCUGAACGAGAGCCUG | |
| | AUCGACCUGCAGGAGCUGGGCAAGUACGAGCAGUACAUC | |
| | AAGUGGCCCUGGUACAUCUGGCUGGGCUUCAUCGCCGGC | |
| | CUGAUCGCCAUCGUGAUGGUGACCAUCAUGCUGUGCUGC | |
| | AUGACCAGCUGCUGCAGCUGCCUGAAGGGCUGUUGCAGC | |
| | UGCGGCAGCUGCUGCAAGUUCGACGAGGACGACAGCGAG | |
| | CCCGUGCUGAAGGGCGUGAAGCUGCACUACACC | |
| 3′UTR | UGAUAAUAGGCUGGAGCCUCGGUGGCCUAGCUUCUUGCC | 4 |
| | CCUUGGGCCUCCCCCCAGCCCCUCCUCCCCUUCCUGCACC | |
| | CGUACCCCCGUGGUCUUUGAAUAAAGUCUGAGUGGGCGG | |
| | C | |
| Corresponding amino | MFVFLVLLPLVSSQCVNLTTRTQLPPAYTNSFTRGVYYPDKVF | 29 |
| acid sequence | RSSVLHSTQDLFLPFFSNVTWFHAIHVSGTNGTKRFDNPVLPF | |
| | NDGVYFASTEKSNIIRGWIFGTTLDSKTQSLLIVNNATNVVIKV | |
| | CEFQFCNDPFLGVYYHKNNKSWMESEFRVYSSANNCTFEYVS | |
| | QPFLMDLEGKQGNFKNLREFVFKNIDGYFKIYSKHTPINLVRD | |
| | LPQGFSALEPLVDLPIGINITRFQTLLALHRSYLTPGDSSSGWT | |
| | AGAAAYYVGYLQPRTFLLKYNENGTITDAVDCALDPLSETKC | |
| | TLKSFTVEKGIYQTSNFRVQPTESIVRFPNITNLCPFGEVFNATR | |
| | FASVYAWNRKRISNCVADYSVLYNSASFSTFKCYGVSPTKLN | |
| | DLCFTNVYADSFVIRGDEVRQIAPGQTGKIADYNYKLPDDFTG | |
| | CVIAWNSNNLDSKVGGNYNYLYRLFRKSNLKPFERDISTEIYQ | |
| | AGSTPCNGVEGFNCYFPLQSYGFQPTNGVGYQPYRVVVLSFE | |
| | LLHAPATVCGPKKSTNLVKNKCVNFNFNGLTGTGVLTESNKK | |
| | FLPFQQFGRDIADTTDAVRDPQTLEILDITPCSFGGVSVITPGTN | |
| | TSNQVAVLYQDVNCTEVPVAIHADQLTPTWRVYSTGSNVFQT | |
| | RAGCLIGAEHVNNSYECDIPIGAGICASYQTQTNSPRRARSVA | |
| | SQSIIAYTMSLGAENSVAYSNNSIAIPTNFTISVTTEILPVSMTK | |
| | TSVDCTMYICGDSTECSNLLLQYGSFCTQLNRALTGIAVEQDK | |
| | NTQEVFAQVKQIYKTPPIKDFGGFNFSQILPDPSKPSKRSFIEDL | |
| | LFNKVTLADAGFIKQYGDCLGDIAARDLICAQKFNGLTVLPPL | |
| | LTDEMIAQYTSALLAGTITSGWTFGAGAALQIPFAMQMAYRF | |
| | NGIGVTQNVLYENQKLIANQFNSAIGKIQDSLSSTASALGKLQ | |
| | DVVNQNAQALNTLVKQLSSNFGAISSVLNDILSRLDPPEAEVQ | |
| | IDRLITGRLQSLQTYVTQQLIRAAEIRASANLAATKMSECVLG | |
| | QSKRVDFCGKGYHLMSFPQSAPHGVVFLHVTYVPAQEKNFTT | |
| | APAICHDGKAHFPREGVFVSNGTHWFVTQRNFYEPQIITTDNT | |
| | FVSGNCDVVIGIVNNTVYDPLQPELDSFKEELDKYFKNHTSPD | |
| | VDLGDISGINASVVNIQKEIDRLNEVAKNLNESLIDLQELGKYE | |
| | QYIKWPWYIWLGFIAGLIAIVMVTIMLCCMTSCCSCLKGCCSC | |
| | GSCCKFDEDDSEPVLKGVKLHYT | |
| PolyA tail | 100 nt | |

SARS-CoV-2 S Protein Variant 10

| SEQ ID NO: 51 consists of from 5′ end to 3′ end: 5′ UTR SEQ ID NO: 2, mRNA ORF SEQ ID | | 51 |
|---|---|---|
| NO: 52, and 3′ UTR SEQ ID NO: 4. | | |
| Chemistry | 1-methylpseudouridine | |
| Cap | 7mG(5′)ppp(5′)NlmpNp | |
| 5′UTR | GGGAAAUAAGAGAGAAAAGAAGAGUAAGAAGAAAUAUA | 2 |
| | AGACCCCGGCGCCGCCACC | |
| ORF of mRNA | AUGUUCGUGUUCCUGGUGCUGCUGCCCCUGGUGAGCAGC | 52 |
| Construct | CAGUGCGUGAACCUGACCACCCGGACCCAGCUGCCACCAG | |
| (excluding the stop | CCUACACCAACAGCUUCACCCGGGGCGUCUACUACCCCGA | |
| codon) | CAAGGUGUUCCGGAGCAGCGUCCUGCACAGCACCCAGGA | |
| | CCUGUUCCUGCCCUUCUUCAGCAACGUGACCUGGUUCCAC | |
| | GCCAUCCACGUGAGCGGCACCAACGGCACCAAGCGGUUCG | |
| | ACAACCCCGUGCUGCCCUUCAACGACGGCGUGUACUUCGC | |
| | CAGCACCGAGAAGAGCAACAUCAUCCGGGGCUGGAUCUU | |
| | CGGCACCACCCUGGACAGCAAGACCCAGAGCCUGCUGAUC | |
| | GUGAAUAACGCCACCAACGUGGUGAUCAAGGUGUGCGAG | |
| | UUCCAGUUCUGCAACGACCCCUUCCUGGGCGUGUACUACC | |
| | ACAAGAACAACAAGAGCUGGAUGGAGAGCGAGUUCCGGG | |
| | UGUACAGCAGCGCCAACAACUGCACCUUCGAGUACGUGA | |
| | GCCAGCCCUUCCUGAUGGACCUGGAGGGCAAGCAGGGCA | |
| | ACUUCAAGAACCUGCGGGAGUUCGUGUUCAAGAACAUCG | |
| | ACGGCUACUUCAAGAUCUACAGCAAGCACACCCCAAUCA | |
| | ACCUGGUGCGGGAUCUGCCCCAGGGCUUCUCAGCCCUGG | |
| | AGCCCCUGGUGGACCUGCCCAUCGGCAUCAACAUCACCCG | |
| | GUUCCAGACCCUGCUGGCCCUGCACCGGAGCUACCUGACC | |
| | CCAGGCGACAGCAGCAGCGGGUGGACAGCAGGCGCGGCU | |
| | GCUUACUACGUGGGCUACCUGCAGCCCCGGACCUUCCUGC | |
| | UGAAGUACAACGAGAACGGCACCAUCACCGACGCCGUGG | |
| | ACUGCGCCCUGGACCCUCUGAGCGAGACCAAGUGCACCCU | |
| | GAAGAGCUUCACCGUGGAGAAGGGCAUCUACCAGACCAG | |
| | CAACUUCCGGGUGCAGCCCACCGAGAGCAUCGUGCGGUU | |
| | CCCCAACAUCACCAACCUGUGCCCCUUCGGCGAGGUGUUC | |
| | AACGCCACCCGGUUCGCCAGCGUGUACGCCUGGAACCGGA | |
| | AGCGGAUCAGCAACUGCGUGGCCGACUACAGCGUGCUGU | |
| | ACAACAGCGCCAGCUUCAGCACCUUCAAGUGCUACGGCG | |
| | UGAGCCCCACCAAGCUGAACGACCUGUGCUUCACCAACGU | |
| | GUACGCCGACAGCUUCGUGAUCCGUGGCGACGAGGUGCG | |
| | GCAGAUCGCACCCGGCCAGACAGGCAAGAUCGCCGACUAC | |
| | AACUACAAGCUGCCCGACGACUUCACCGGCUGCGUGAUC | |
| | GCCUGGAACAGCAACAACCUCGACAGCAAGGUGGGCGGC | |
| | AACUACAACUACCUGUACCGGCUGUUCCGGAAGAGCAAC | |
| | CUGAAGCCCUUCGAGCGGGACAUCAGCACCGAGAUCUAC | |
| | CAAGCCGGCUCCACCCCUUGCAACGGCGUGGAGGGCUUCA | |
| | ACUGCUACUUCCCUCUGCAGAGCUACGGCUUCCAGCCCAC | |
| | CAACGGCGUGGGCUACCAGCCCUACCGGGUGGUGGUGCU | |
| | GAGCUUCGAGCUGCUGCACGCCCCAGCCACCGUGUGUGGC | |
| | CCCAAGAAGAGCACCAACCUGGUGAAGAACAAGUGCGUG | |
| | AACUUCAACUUCAACGGCCUUACCGGCACCGGCGUGCUG | |
| | ACCGAGAGCAACAAGAAAUUCCUGCCCUUUCAGCAGUUC | |
| | GGCCGGGACAUCGCCGACACCACCGACGCUGUGCGGGAUC | |
| | CCCAGACCCUGGAGAUCCUGGACAUCACCCCUUGCAGCUU | |
| | CGGCGGCGUGAGCGUGAUCACCCCAGGCACCAACACCAGC | |
| | AACCAGGUGGCCGUGCUGUACCAGGACGUGAACUGCACC | |
| | GAGGUGCCCGUGGCCAUCCACGCCGACCAGCUGACACCCA | |
| | CCUGGCGGGUCUACAGCACCGGCAGCAACGUGUUCCAGA | |
| | CCCGGGCCGGUUGCCUGAUCGGCGCCGAGCACGUGAACA | |
| | ACAGCUACGAGUGCGACAUCCCCAUCGGCGCCGGCAUCUG | |
| | UGCCAGCUACCAGACCCAGACCAAUUCACCCCGGAGGGCA | |
| | AGGAGCGUGGCCAGCCAGAGCAUCAUCGCCUACACCAUG | |
| | AGCCUGGGCGCCGAGAACAGCGUGGCCUACAGCAACAAC | |
| | AGCAUCGCCAUCCCCACCAACUUCACCAUCAGCGUGACCA | |
| | CCGAGAUUCUGCCCGUGAGCAUGACCAAGACCAGCGUGG | |
| | ACUGCACCAUGUACAUCUGCGGCGACAGCACCGAGUGCA | |
| | GCAACCUGCUGCUGCAGUACGGCAGCUUCUGCACCCAGCU | |
| | GAACCGGGCCCUGACCGGCAUCGCCGUGGAGCAGGACAA | |
| | GAACACCCAGGAGGUGUUCGCCCAGGUGAAGCAGAUCUA | |
| | CAAGACCCCUCCCAUCAAGGACUUCGGCGGCUUCAACUUC | |
| | AGCCAGAUCCUGCCCGACCCCAGCAAGCCCAGCAAGCGGA | |
| | GCUUCAUCGAGGACCUGCUGUUCAACAAGGUGACCCUAG | |
| | CCGACGCCGGCUUCAUCAAGCAGUACGGCGACUGCCUCGG | |
| | CGACAUAGCCGCCCGGGACCUGAUCUGCGCCCAGAAGUUC | |
| | AACGGCCUGACCGUGCUGCCUCCCCUGCUGACCGACGAGA | |
| | UGAUCGCCCAGUACACCAGCGCCCUGUUAGCCGGAACCAU | |
| | CACCAGCGGCUGGACUUUCGGCGCUGGAGCCGCUCUGCA | |
| | GAUCCCCUUCGCCAUGCAGAUGGCCUACCGGUUCAACGGC | |
| | AUCGGCGUGACCCAGAACGUGCUGUACGAGAACCAGAAG | |
| | CUGAUCGCCAACCAGUUCAACAGCGCCAUCGGCAAGAUCC | |
| | AGGACAGCCUGAGCAGCACCGCUAGCGCCCUGGGCAAGC | |
| | UGCAGGACGUGGUGAACCAGAACGCCCAGGCCCUGAACA | |
| | CCCUGGUGAAGCAGCUGAGCAGCAACUUCGGCGCCAUCA | |
| | GCAGCGUGCUGAACGACAUCCUGAGCCGGCUGGACAAGG | |
| | UGGAGGCCGAGGUGCAGAUCGACCGGCUGAUCACUGGCC | |
| | GGCUGCAGAGCCUGCAGACCUACGUGACCCAGCAGCUGA | |
| | UCCGGGCCGCCGAGAUUCGGGCCAGCGCCAACCUGGCCGC | |
| | CACCAAGAUGAGCGAGUGCGUGCUGGGCCAGAGCAAGCG | |
| | GGUGGACUUCUGCGGCAAGGGCUACCACCUGAUGAGCUU | |
| | UCCCCAGAGCGCACCCCACGGAGUGGUGUUCCUGCACGUG | |
| | ACCUACGUGCCCGCCCAGGAGAAGAACUUCACCACCGCCC | |
| | CAGCCAUCUGCCACGACGGCAAGGCCCACUUUCCCCGGGA | |
| | GGGCGUGUUCGUGAGCAACGGCACCCACUGGUUCGUGAC | |
| | CCAGCGGAACUUCUACGAGCCCCAGAUCAUCACCACCGAC | |
| | AACACCUUCGUGAGCGGCAACUGCGACGUGGUGAUCGGC | |
| | AUCGUGAACAACACCGUGUACGAUCCCCUGCAGCCCGAGC | |
| | UGGACAGCUUCAAGGAGGAGCUGGACAAGUACUUCAAGA | |
| | AUCACACCAGCCCCGACGUGGACCUGGGCGACAUCAGCGG | |
| | CAUCAACGCCAGCGUGGUGAACAUCCAGAAGGAGAUCGA | |
| | UCGGCUGAACGAGGUGGCCAAGAACCUGAACGAGAGCCU | |
| | GAUCGACCUGCAGGAGCUGGGCAAGUACGAGCAGUACAU | |
| | CAAGUGGCCCUGGUACAUCUGGCUGGGCUUCAUCGCCGG | |
| | CCUGAUCGCCAUCGUGAUGGUGACCAUCAUGCUGUGCUG | |
| | CAUGACCAGCUGCUGCAGCUGCCUGAAGGGCUGUUGCAG | |
| | CUGCGGCAGCUGCUGCAAGUUCGACGAGGACGAC | |
| 3′UTR | UGAUAAUAGGCUGGAGCCUCGGUGGCCUAGCUUCUUGCC | 4 |
| | CCUUGGGCCUCCCCCCAGCCCCUCCUCCCCUUCCUGCACC | |
| | CGUACCCCCGUGGUCUUUGAAUAAAGUCUGAGUGGGCGG | |
| | C | |
| Corresponding amino | MFVFLVLLPLVSSQCVNLTTRTQLPPAYTNSFTRGVYYPDKVF | 33 |
| acid sequence | RSSVLHSTQDLFLPFFSNVTWFHAIHVSGTNGTKRFDNPVLPF | |
| | NDGVYFASTEKSNIIRGWIFGTTLDSKTQSLLIVNNATNVVIKV | |
| | CEFQFCNDPFLGVYYHKNNKSWMESEFRVYSSANNCTFEYVS | |
| | QPFLMDLEGKQGNFKNLREFVFKNIDGYFKIYSKHTPINLVRD | |
| | LPQGFSALEPLVDLPIGINITRFQTLLALHRSYLTPGDSSSGWT | |
| | AGAAAYYVGYLQPRTFLLKYNENGTITDAVDCALDPLSETKC | |
| | TLKSFTVEKGIYQTSNFRVQPTESIVRFPNITNLCPFGEVFNATR | |
| | FASVYAWNRKRISNCVADYSVLYNSASFSTFKCYGVSPTKLN | |
| | DLCFTNVYADSFVIRGDEVRQIAPGQTGKIADYNYKLPDDFTG | |
| | CVIAWNSNNLDSKVGGNYNYLYRLFRKSNLKPFERDISTEIYQ | |
| | AGSTPCNGVEGFNCYFPLQSYGFQPTNGVGYQPYRVVVLSFE | |
| | LLHAPATVCGPKKSTNLVKNKCVNFNFNGLTGTGVLTESNKK | |
| | FLPFQQFGRDIADTTDAVRDPQTLEILDITPCSFGGVSVITPGTN | |
| | TSNQVAVLYQDVNCTEVPVAIHADQLTPTWRVYSTGSNVFQT | |
| | RAGCLIGAEHVNNSYECDIPIGAGICASYQTQTNSPRRARSVA | |
| | SQSIIAYTMSLGAENSVAYSNNSIAIPTNFTISVTTEILPVSMTK | |
| | TSVDCTMYICGDSTECSNLLLQYGSFCTQLNRALTGIAVEQDK | |
| | NTQEVFAQVKQIYKTPPIKDFGGFNFSQILPDPSKPSKRSFIEDL | |
| | LFNKVTLADAGFIKQYGDCLGDIAARDLICAQKFNGLTVLPPL | |
| | LTDEMIAQYTSALLAGTITSGWTFGAGAALQIPFAMQMAYRF | |
| | NGIGVTQNVLYENQKLIANQFNSAIGKIQDSLSSTASALGKLQ | |
| | DVVNQNAQALNTLVKQLSSNFGAISSVLNDILSRLDKVEAEV | |
| | QIDRLITGRLQSLQTYVTQQLIRAAEIRASANLAATKMSECVL | |
| | GQSKRVDFCGKGYHLMSFPQSAPHGVVFLHVTYVPAQEKNF | |
| | TTAPAICHDGKAHFPREGVFVSNGTHWFVTQRNFYEPQIITTD | |
| | NTFVSGNCDVVIGIVNNTVYDPLQPELDSFKEELDKYFKNHTS | |
| | PDVDLGDISGINASVVNIQKEIDRLNEVAKNLNESLIDLQELGK | |
| | YEQYIKWPWYIWLGFIAGLIAIVMVTIMLCCMTSCCSCLKGCC | |
| | SCGSCCKFDEDD | |
| PolyA tail | 100 nt | |

SARS-CoV-2 S Protein Variant 11

| SEQ ID NO: 53 consists of from 5′ end to 3′ end: 5′ UTR SEQ ID NO: 2, mRNA ORF SEQ ID | | 53 |
|---|---|---|
| NO: 54, and 3′ UTR SEQ ID NO: 4. | | |
| Chemistry | 1-methylpseudouridine | |
| Cap | 7mG(5′)ppp(5′)NlmpNp | |
| 5′UTR | GGGAAAUAAGAGAGAAAAGAAGAGUAAGAAGAAAUAUA | 2 |
| | AGACCCCGGCGCCGCCACC | |
| ORF of mRNA | AUGUUCGUGUUCCUGGUGCUGCUGCCCCUGGUGAGCAGC | 54 |
| Construct | CAGUGCGUGAACCUGACCACCCGGACCCAGCUGCCACCAG | |
| (excluding the stop | CCUACACCAACAGCUUCACCCGGGGCGUCUACUACCCCGA | |
| codon) | CAAGGUGUUCCGGAGCAGCGUCCUGCACAGCACCCAGGA | |
| | CCUGUUCCUGCCCUUCUUCAGCAACGUGACCUGGUUCCAC | |
| | GCCAUCCACGUGAGCGGCACCAACGGCACCAAGCGGUUCG | |
| | ACAACCCCGUGCUGCCCUUCAACGACGGCGUGUACUUCGC | |
| | CAGCACCGAGAAGAGCAACAUCAUCCGGGGCUGGAUCUU | |
| | CGGCACCACCCUGGACAGCAAGACCCAGAGCCUGCUGAUC | |
| | GUGAAUAACGCCACCAACGUGGUGAUCAAGGUGUGCGAG | |
| | UUCCAGUUCUGCAACGACCCCUUCCUGGGCGUGUACUACC | |
| | ACAAGAACAACAAGAGCUGGAUGGAGAGCGAGUUCCGGG | |
| | UGUACAGCAGCGCCAACAACUGCACCUUCGAGUACGUGA | |
| | GCCAGCCCUUCCUGAUGGACCUGGAGGGCAAGCAGGGCA | |
| | ACUUCAAGAACCUGCGGGAGUUCGUGUUCAAGAACAUCG | |
| | ACGGCUACUUCAAGAUCUACAGCAAGCACACCCCAAUCA | |
| | ACCUGGUGCGGGAUCUGCCCCAGGGCUUCUCAGCCCUGG | |
| | AGCCCCUGGUGGACCUGCCCAUCGGCAUCAACAUCACCCG | |
| | GUUCCAGACCCUGCUGGCCCUGCACCGGAGCUACCUGACC | |
| | CCAGGCGACAGCAGCAGCGGGUGGACAGCAGGCGCGGCU | |
| | GCUUACUACGUGGGCUACCUGCAGCCCCGGACCUUCCUGC | |
| | UGAAGUACAACGAGAACGGCACCAUCACCGACGCCGUGG | |
| | ACUGCGCCCUGGACCCUCUGAGCGAGACCAAGUGCACCCU | |
| | GAAGAGCUUCACCGUGGAGAAGGGCAUCUACCAGACCAG | |
| | CAACUUCCGGGUGCAGCCCACCGAGAGCAUCGUGCGGUU | |
| | CCCCAACAUCACCAACCUGUGCCCCUUCGGCGAGGUGUUC | |
| | AACGCCACCCGGUUCGCCAGCGUGUACGCCUGGAACCGGA | |
| | AGCGGAUCAGCAACUGCGUGGCCGACUACAGCGUGCUGU | |
| | ACAACAGCGCCAGCUUCAGCACCUUCAAGUGCUACGGCG | |
| | UGAGCCCCACCAAGCUGAACGACCUGUGCUUCACCAACGU | |
| | GUACGCCGACAGCUUCGUGAUCCGUGGCGACGAGGUGCG | |
| | GCAGAUCGCACCCGGCCAGACAGGCAAGAUCGCCGACUAC | |
| | AACUACAAGCUGCCCGACGACUUCACCGGCUGCGUGAUC | |
| | GCCUGGAACAGCAACAACCUCGACAGCAAGGUGGGCGGC | |
| | AACUACAACUACCUGUACCGGCUGUUCCGGAAGAGCAAC | |
| | CUGAAGCCCUUCGAGCGGGACAUCAGCACCGAGAUCUAC | |
| | CAAGCCGGCUCCACCCCUUGCAACGGCGUGGAGGGCUUCA | |
| | ACUGCUACUUCCCUCUGCAGAGCUACGGCUUCCAGCCCAC | |
| | CAACGGCGUGGGCUACCAGCCCUACCGGGUGGUGGUGCU | |
| | GAGCUUCGAGCUGCUGCACGCCCCAGCCACCGUGUGUGGC | |
| | CCCAAGAAGAGCACCAACCUGGUGAAGAACAAGUGCGUG | |
| | AACUUCAACUUCAACGGCCUUACCGGCACCGGCGUGCUG | |
| | ACCGAGAGCAACAAGAAAUUCCUGCCCUUUCAGCAGUUC | |
| | GGCCGGGACAUCGCCGACACCACCGACGCUGUGCGGGAUC | |
| | CCCAGACCCUGGAGAUCCUGGACAUCACCCCUUGCAGCUU | |
| | CGGCGGCGUGAGCGUGAUCACCCCAGGCACCAACACCAGC | |
| | AACCAGGUGGCCGUGCUGUACCAGGACGUGAACUGCACC | |
| | GAGGUGCCCGUGGCCAUCCACGCCGACCAGCUGACACCCA | |
| | CCUGGCGGGUCUACAGCACCGGCAGCAACGUGUUCCAGA | |
| | CCCGGGCCGGUUGCCUGAUCGGCGCCGAGCACGUGAACA | |
| | ACAGCUACGAGUGCGACAUCCCCAUCGGCGCCGGCAUCUG | |
| | UGCCAGCUACCAGACCCAGACCAAUUCACCCCGGAGGGCA | |
| | AGGAGCGUGGCCAGCCAGAGCAUCAUCGCCUACACCAUG | |
| | AGCCUGGGCGCCGAGAACAGCGUGGCCUACAGCAACAAC | |
| | AGCAUCGCCAUCCCCACCAACUUCACCAUCAGCGUGACCA | |
| | CCGAGAUUCUGCCCGUGAGCAUGACCAAGACCAGCGUGG | |
| | ACUGCACCAUGUACAUCUGCGGCGACAGCACCGAGUGCA | |
| | GCAACCUGCUGCUGCAGUACGGCAGCUUCUGCACCCAGCU | |
| | GAACCGGGCCCUGACCGGCAUCGCCGUGGAGCAGGACAA | |
| | GAACACCCAGGAGGUGUUCGCCCAGGUGAAGCAGAUCUA | |
| | CAAGACCCCUCCCAUCAAGGACUUCGGCGGCUUCAACUUC | |
| | AGCCAGAUCCUGCCCGACCCCAGCAAGCCCAGCAAGCGGA | |
| | GCUUCAUCGAGGACCUGCUGUUCAACAAGGUGACCCUAG | |
| | CCGACGCCGGCUUCAUCAAGCAGUACGGCGACUGCCUCGG | |
| | CGACAUAGCCGCCCGGGACCUGAUCUGCGCCCAGAAGUUC | |
| | AACGGCCUGACCGUGCUGCCUCCCCUGCUGACCGACGAGA | |
| | UGAUCGCCCAGUACACCAGCGCCCUGUUAGCCGGAACCAU | |
| | CACCAGCGGCUGGACUUUCGGCGCUGGAGCCGCUCUGCA | |
| | GAUCCCCUUCGCCAUGCAGAUGGCCUACCGGUUCAACGGC | |
| | AUCGGCGUGACCCAGAACGUGCUGUACGAGAACCAGAAG | |
| | CUGAUCGCCAACCAGUUCAACAGCGCCAUCGGCAAGAUCC | |
| | AGGACAGCCUGAGCAGCACCGCUAGCGCCCUGGGCAAGC | |
| | UGCAGGACGUGGUGAACCAGAACGCCCAGGCCCUGAACA | |
| | CCCUGGUGAAGCAGCUGAGCAGCAACUUCGGCGCCAUCA | |
| | GCAGCGUGCUGAACGACAUCCUGAGCCGGCUGGACCCUCC | |
| | CGAGGCCGAGGUGCAGAUCGACCGGCUGAUCACUGGCCG | |
| | GCUGCAGAGCCUGCAGACCUACGUGACCCAGCAGCUGAU | |
| | CCGGGCCGCCGAGAUUCGGGCCAGCGCCAACCUGGCCGCC | |
| | ACCAAGAUGAGCGAGUGCGUGCUGGGCCAGAGCAAGCGG | |
| | GUGGACUUCUGCGGCAAGGGCUACCACCUGAUGAGCUUU | |
| | CCCCAGAGCGCACCCCACGGAGUGGUGUUCCUGCACGUGA | |
| | CCUACGUGCCCGCCCAGGAGAAGAACUUCACCACCGCCCC | |
| | AGCCAUCUGCCACGACGGCAAGGCCCACUUUCCCCGGGAG | |
| | GGCGUGUUCGUGAGCAACGGCACCCACUGGUUCGUGACC | |
| | CAGCGGAACUUCUACGAGCCCCAGAUCAUCACCACCGACA | |
| | ACACCUUCGUGAGCGGCAACUGCGACGUGGUGAUCGGCA | |
| | UCGUGAACAACACCGUGUACGAUCCCCUGCAGCCCGAGCU | |
| | GGACAGCUUCAAGGAGGAGCUGGACAAGUACUUCAAGAA | |
| | UCACACCAGCCCCGACGUGGACCUGGGCGACAUCAGCGGC | |
| | AUCAACGCCAGCGUGGUGAACAUCCAGAAGGAGAUCGAU | |
| | CGGCUGAACGAGGUGGCCAAGAACCUGAACGAGAGCCUG | |
| | AUCGACCUGCAGGAGCUGGGCAAGUACGAGCAGUACAUC | |
| | AAGUGGCCCUGGUACAUCUGGCUGGGCUUCAUCGCCGGC | |
| | CUGAUCGCCAUCGUGAUGGUGACCAUCAUGCUGUGCUGC | |
| | AUGACCAGCUGCUGCAGCUGCCUGAAGGGCUGUUGCAGC | |
| | UGCGGCAGCUGCUGCAAGUUCGACGAGGACGAC | |
| 3′UTR | UGAUAAUAGGCUGGAGCCUCGGUGGCCUAGCUUCUUGCC | 4 |
| | CCUUGGGCCUCCCCCCAGCCCCUCCUCCCCUUCCUGCACC | |
| | CGUACCCCCGUGGUCUUUGAAUAAAGUCUGAGUGGGCGG | |
| | C | |
| Corresponding amino | MFVFLVLLPLVSSQCVNLTTRTQLPPAYTNSFTRGVYYPDKVF | 34 |
| acid sequence | RSSVLHSTQDLFLPFFSNVTWFHAIHVSGTNGTKRFDNPVLPF | |
| | NDGVYFASTEKSNIIRGWIFGTTLDSKTQSLLIVNNATNVVIKV | |
| | CEFQFCNDPFLGVYYHKNNKSWMESEFRVYSSANNCTFEYVS | |
| | QPFLMDLEGKQGNFKNLREFVFKNIDGYFKIYSKHTPINLVRD | |
| | LPQGFSALEPLVDLPIGINITRFQTLLALHRSYLTPGDSSSGWT | |
| | AGAAAYYVGYLQPRTFLLKYNENGTITDAVDCALDPLSETKC | |
| | TLKSFTVEKGIYQTSNFRVQPTESIVRFPNITNLCPFGEVFNATR | |
| | FASVYAWNRKRISNCVADYSVLYNSASFSTFKCYGVSPTKLN | |
| | DLCFTNVYADSFVIRGDEVRQIAPGQTGKIADYNYKLPDDFTG | |
| | CVIAWNSNNLDSKVGGNYNYLYRLFRKSNLKPFERDISTEIYQ | |
| | AGSTPCNGVEGFNCYFPLQSYGFQPTNGVGYQPYRVVVLSFE | |
| | LLHAPATVCGPKKSTNLVKNKCVNFNFNGLTGTGVLTESNKK | |
| | FLPFQQFGRDIADTTDAVRDPQTLEILDITPCSFGGVSVITPGTN | |
| | TSNQVAVLYQDVNCTEVPVAIHADQLTPTWRVYSTGSNVFQT | |
| | RAGCLIGAEHVNNSYECDIPIGAGICASYQTQTNSPRRARSVA | |
| | SQSIIAYTMSLGAENSVAYSNNSIAIPTNFTISVTTEILPVSMTK | |
| | TSVDCTMYICGDSTECSNLLLQYGSFCTQLNRALTGIAVEQDK | |
| | NTQEVFAQVKQIYKTPPIKDFGGFNFSQILPDPSKPSKRSFIEDL | |
| | LFNKVTLADAGFIKQYGDCLGDIAARDLICAQKFNGLTVLPPL | |
| | LTDEMIAQYTSALLAGTITSGWTFGAGAALQIPFAMQMAYRF | |
| | NGIGVTQNVLYENQKLIANQFNSAIGKIQDSLSSTASALGKLQ | |
| | DVVNQNAQALNTLVKQLSSNFGAISSVLNDILSRLDPPEAEVQ | |
| | IDRLITGRLQSLQTYVTQQLIRAAEIRASANLAATKMSECVLG | |
| | QSKRVDFCGKGYHLMSFPQSAPHGVVFLHVTYVPAQEKNFTT | |
| | APAICHDGKAHFPREGVFVSNGTHWFVTQRNFYEPQIITTDNT | |
| | FVSGNCDVVIGIVNNTVYDPLQPELDSFKEELDKYFKNHTSPD | |
| | VDLGDISGINASVVNIQKEIDRLNEVAKNLNESLIDLQELGKYE | |
| | QYIKWPWYIWLGFIAGLIAIVMVTIMLCCMTSCCSCLKGCCSC | |
| | GSCCKFDEDD | |
| PolyA tail | 100 nt | |

SARS-CoV-2 S Protein Variant 12

| SEQ ID NO: 55 consists of from 5′ end to 3′ end: 5′ UTR SEQ ID NO: 2, mRNA ORF SEQ ID | | 55 |
|---|---|---|
| NO: 56, and 3′ UTR SEQ ID NO: 4. | | |
| Chemistry | 1-methylpseudouridine | |
| Cap | 7mG(5′)ppp(5′)NlmpNp | |
| 5′UTR | GGGAAAUAAGAGAGAAAAGAAGAGUAAGAAGAAAUAUA | 2 |
| | AGACCCCGGCGCCGCCACC | |
| ORF of mRNA | UUUCAACGACGGCGUGUACUUCGCCAGCACCGAGAAGAG | 56 |
| Construct | CAACAUCAUCCGGGGCUGGAUCUUCGGCACCACCCUGGAC | |
| (excluding the stop | AGCAAGACCCAGAGCCUGCUGAUCGUGAAUAACGCCACC | |
| codon) | AACGUGGUGAUCAAGGUGUGCGAGUUCCAGUUCUGCAAC | |
| | GACCCCUUCCUGGGCGUGUACUACCACAAGAACAACAAG | |
| | AGCUGGAUGGAGAGCGAGUUCCGGGUGUACAGCAGCGCC | |
| | AACAACUGCACCUUCGAGUACGUGAGCCAGCCCUUCCUG | |
| | AUGGACCUGGAGGGCAAGCAGGGCAACUUCAAGAACCUG | |
| | CGGGAGUUCGUGUUCAAGAACAUCGACGGCUACUUCAAG | |
| | AUCUACAGCAAGCACACCCCAAUCAACCUGGUGCGGGAU | |
| | CUGCCCCAGGGCUUCUCAGCCCUGGAGCCCCUGGUGGACC | |
| | UGCCCAUCGGCAUCAACAUCACCCGGUUCCAGACCCUGCU | |
| | GGCCCUGCACCGGAGCUACCUGACCCCAGGCGACAGCAGC | |
| | AGCGGGUGGACAGCAGGCGCGGCUGCUUACUACGUGGGC | |
| | UACCUGCAGCCCCGGACCUUCCUGCUGAAGUACAACGAG | |
| | AACGGCACCAUCACCGACGCCGUGGACUGCGCCCUGGACC | |
| | CUCUGAGCGAGACCAAGUGCACCCUGAAGAGCUUCACCG | |
| | UGGAGAAGGGCAUCUACCAGACCAGCAACUUCCGGGUGC | |
| | AGCCCACCGAGAGCAUCGUGCGGUUCCCCAACAUCACCAA | |
| | CCUGUGCCCCUUCGGCGAGGUGUUCAACGCCACCCGGUUC | |
| | GCCAGCGUGUACGCCUGGAACCGGAAGCGGAUCAGCAAC | |
| | UGCGUGGCCGACUACAGCGUGCUGUACAACAGCGCCAGC | |
| | UUCAGCACCUUCAAGUGCUACGGCGUGAGCCCCACCAAGC | |
| | UGAACGACCUGUGCUUCACCAACGUGUACGCCGACAGCU | |
| | UCGUGAUCCGUGGCGACGAGGUGCGGCAGAUCGCACCCG | |
| | GCCAGACAGGCAAGAUCGCCGACUACAACUACAAGCUGC | |
| | CCGACGACUUCACCGGCUGCGUGAUCGCCUGGAACAGCA | |
| | ACAACCUCGACAGCAAGGUGGGCGGCAACUACAACUACC | |
| | UGUACCGGCUGUUCCGGAAGAGCAACCUGAAGCCCUUCG | |
| | AGCGGGACAUCAGCACCGAGAUCUACCAAGCCGGCUCCAC | |
| | CCCUUGCAACGGCGUGGAGGGCUUCAACUGCUACUUCCC | |
| | UCUGCAGAGCUACGGCUUCCAGCCCACCAACGGCGUGGGC | |
| | UACCAGCCCUACCGGGUGGUGGUGCUGAGCUUCGAGCUG | |
| | CUGCACGCCCCAGCCACCGUGUGUGGCCCCAAGAAGAGCA | |
| | CCAACCUGGUGAAGAACAAGUGCGUGAACUUCAACUUCA | |
| | ACGGCCUUACCGGCACCGGCGUGCUGACCGAGAGCAACA | |
| | AGAAAUUCCUGCCCUUUCAGCAGUUCGGCCGGGACAUCG | |
| | CCGACACCACCGACGCUGUGCGGGAUCCCCAGACCCUGGA | |
| | GAUCCUGGACAUCACCCCUUGCAGCUUCGGCGGCGUGAG | |
| | CGUGAUCACCCCAGGCACCAACACCAGCAACCAGGUGGCC | |
| | GUGCUGUACCAGGACGUGAACUGCACCGAGGUGCCCGUG | |
| | GCCAUCCACGCCGACCAGCUGACACCCACCUGGCGGGUCU | |
| | ACAGCACCGGCAGCAACGUGUUCCAGACCCGGGCCGGUU | |
| | GCCUGAUCGGCGCCGAGCACGUGAACAACAGCUACGAGU | |
| | GCGACAUCCCCAUCGGCGCCGGCAUCUGUGCCAGCUACCA | |
| | GACCCAGACCAAUUCACCCGGCAGCGGCGGCAGCGUGGCC | |
| | AGCCAGAGCAUCAUCGCCUACACCAUGAGCCUGGGCGCCG | |
| | AGAACAGCGUGGCCUACAGCAACAACAGCAUCGCCAUCCC | |
| | CACCAACUUCACCAUCAGCGUGACCACCGAGAUUCUGCCC | |
| | GUGAGCAUGACCAAGACCAGCGUGGACUGCACCAUGUAC | |
| | AUCUGCGGCGACAGCACCGAGUGCAGCAACCUGCUGCUG | |
| | CAGUACGGCAGCUUCUGCACCCAGCUGAACCGGGCCCUGA | |
| | CCGGCAUCGCCGUGGAGCAGGACAAGAACACCCAGGAGG | |
| | UGUUCGCCCAGGUGAAGCAGAUCUACAAGACCCCUCCCA | |
| | UCAAGGACUUCGGCGGCUUCAACUUCAGCCAGAUCCUGC | |
| | CCGACCCCAGCAAGCCCAGCAAGCGGAGCUUCAUCGAGGA | |
| | CCUGCUGUUCAACAAGGUGACCCUAGCCGACGCCGGCUUC | |
| | AUCAAGCAGUACGGCGACUGCCUCGGCGACAUAGCCGCCC | |
| | GGGACCUGAUCUGCGCCCAGAAGUUCAACGGCCUGACCG | |
| | UGCUGCCUCCCCUGCUGACCGACGAGAUGAUCGCCCAGUA | |
| | CACCAGCGCCCUGUUAGCCGGAACCAUCACCAGCGGCUGG | |
| | ACUUUCGGCGCUGGAGCCGCUCUGCAGAUCCCCUUCGCCA | |
| | UGCAGAUGGCCUACCGGUUCAACGGCAUCGGCGUGACCC | |
| | AGAACGUGCUGUACGAGAACCAGAAGCUGAUCGCCAACC | |
| | AGUUCAACAGCGCCAUCGGCAAGAUCCAGGACAGCCUGA | |
| | GCAGCACCGCUAGCGCCCUGGGCAAGCUGCAGGACGUGG | |
| | UGAACCAGAACGCCCAGGCCCUGAACACCCUGGUGAAGC | |
| | AGCUGAGCAGCAACUUCGGCGCCAUCAGCAGCGUGCUGA | |
| | ACGACAUCCUGAGCCGGCUGGACCCUCCCGAGGCCGAGGU | |
| | GCAGAUCGACCGGCUGAUCACUGGCCGGCUGCAGAGCCU | |
| | GCAGACCUACGUGACCCAGCAGCUGAUCCGGGCCGCCGAG | |
| | AUUCGGGCCAGCGCCAACCUGGCCGCCACCAAGAUGAGCG | |
| | AGUGCGUGCUGGGCCAGAGCAAGCGGGUGGACUUCUGCG | |
| | GCAAGGGCUACCACCUGAUGAGCUUUCCCCAGAGCGCACC | |
| | CCACGGAGUGGUGUUCCUGCACGUGACCUACGUGCCCGCC | |
| | CAGGAGAAGAACUUCACCACCGCCCCAGCCAUCUGCCACG | |
| | ACGGCAAGGCCCACUUUCCCCGGGAGGGCGUGUUCGUGA | |
| | GCAACGGCACCCACUGGUUCGUGACCCAGCGGAACUUCU | |
| | ACGAGCCCCAGAUCAUCACCACCGACAACACCUUCGUGAG | |
| | CGGCAACUGCGACGUGGUGAUCGGCAUCGUGAACAACAC | |
| | CGUGUACGAUCCCCUGCAGCCCGAGCUGGACAGCUUCAA | |
| | GGAGGAGCUGGACAAGUACUUCAAGAAUCACACCAGCCC | |
| | CGACGUGGACCUGGGCGACAUCAGCGGCAUCAACGCCAG | |
| | CGUGGUGAACAUCCAGAAGGAGAUCGAUCGGCUGAACGA | |
| | GGUGGCCAAGAACCUGAACGAGAGCCUGAUCGACCUGCA | |
| | GGAGCUGGGCAAGUACGAGCAGUACAUCAAGUGGCCCUG | |
| | GUACAUCUGGCUGGGCUUCAUCGCCGGCCUGAUCGCCAU | |
| | CGUGAUGGUGACCAUCAUGCUGUGCUGCAUGACCAGCUG | |
| | CUGCAGCUGCCUGAAGGGCUGUUGCAGCUGCGGCAGCUG | |
| | CUGCAAGUUCGACGAGGACGAC | |
| 3′UTR | UGAUAAUAGGCUGGAGCCUCGGUGGCCUAGCUUCUUGCC | 4 |
| | CCUUGGGCCUCCCCCCAGCCCCUCCUCCCCUUCCUGCACC | |
| | CGUACCCCCGUGGUCUUUGAAUAAAGUCUGAGUGGGCGG | |
| | C | |
| Corresponding amino | MFVFLVLLPLVSSQCVNLTTRTQLPPAYTNSFTRGVYYPDKVF | 35 |
| acid sequence | RSSVLHSTQDLFLPFFSNVTWFHAIHVSGTNGTKRFDNPVLPF | |
| | NDGVYFASTEKSNIIRGWIFGTTLDSKTQSLLIVNNATNVVIKV | |
| | CEFQFCNDPFLGVYYHKNNKSWMESEFRVYSSANNCTFEYVS | |
| | QPFLMDLEGKQGNFKNLREFVFKNIDGYFKIYSKHTPINLVRD | |
| | LPQGFSALEPLVDLPIGINITRFQTLLALHRSYLTPGDSSSGWT | |
| | AGAAAYYVGYLQPRTFLLKYNENGTITDAVDCALDPLSETKC | |
| | TLKSFTVEKGIYQTSNFRVQPTESIVRFPNITNLCPFGEVFNATR | |
| | FASVYAWNRKRISNCVADYSVLYNSASFSTFKCYGVSPTKLN | |
| | DLCFTNVYADSFVIRGDEVRQIAPGQTGKIADYNYKLPDDFTG | |
| | CVIAWNSNNLDSKVGGNYNYLYRLFRKSNLKPFERDISTEIYQ | |
| | AGSTPCNGVEGFNCYFPLQSYGFQPTNGVGYQPYRVVVLSFE | |
| | LLHAPATVCGPKKSTNLVKNKCVNFNFNGLTGTGVLTESNKK | |
| | FLPFQQFGRDIADTTDAVRDPQTLEILDITPCSFGGVSVITPGTN | |
| | TSNQVAVLYQDVNCTEVPVAIHADQLTPTWRVYSTGSNVFQT | |
| | RAGCLIGAEHVNNSYECDIPIGAGICASYQTQTNSPGSGGSVA | |
| | SQSIIAYTMSLGAENSVAYSNNSIAIPTNFTISVTTEILPVSMTK | |
| | TSVDCTMYICGDSTECSNLLLQYGSFCTQLNRALTGIAVEQDK | |
| | NTQEVFAQVKQIYKTPPIKDFGGFNFSQILPDPSKPSKRSFIEDL | |
| | LFNKVTLADAGFIKQYGDCLGDIAARDLICAQKFNGLTVLPPL | |
| | LTDEMIAQYTSALLAGTITSGWTFGAGAALQIPFAMQMAYRF | |
| | NGIGVTQNVLYENQKLIANQFNSAIGKIQDSLSSTASALGKLQ | |
| | DVVNQNAQALNTLVKQLSSNFGAISSVLNDILSRLDPPEAEVQ | |
| | IDRLITGRLQSLQTYVTQQLIRAAEIRASANLAATKMSECVLG | |
| | QSKRVDFCGKGYHLMSFPQSAPHGVVFLHVTYVPAQEKNFTT | |
| | APAICHDGKAHFPREGVFVSNGTHWFVTQRNFYEPQIITTDNT | |
| | FVSGNCDVVIGIVNNTVYDPLQPELDSFKEELDKYFKNHTSPD | |
| | VDLGDISGINASVVNIQKEIDRLNEVAKNLNESLIDLQELGKYE | |
| | QYIKWPWYIWLGFIAGLIAIVMVTIMLCCMTSCCSCLKGCCSC | |
| | GSCCKFDEDD | |
| PolyA tail | 100 nt | |

WIV16 S Protein Variant 1

| SEQ ID NO: 57 consists of from 5′ end to 3′ end: 5′ UTR SEQ ID NO: 2, mRNA ORF SEQ ID | | 57 |
|---|---|---|
| NO: 48, and 3′ UTR SEQ ID NO: 4. | | |
| Chemistry | 1-methylpseudouridine | |
| Cap | 7mG(5′)ppp(5′)NlmpNp | |
| 5′UTR | GGGAAAUAAGAGAGAAAAGAAGAGUAAGAAGAAAUAUA | 2 |
| | AGACCCCGGCGCCGCCACC | |
| ORF of mRNA | AUGUUUAUCUUCCUGUUCUUCCUGACCCUGACCAGCGGC | 48 |
| Construct | AGCGACCUGGAAAGCUGCACCACCUUCGACGACGUGCAG | |
| (excluding the stop | GCCCCCAACUACCCUCAGCACAGCUCUAGCAGACGGGGCG | |
| codon) | UGUACUACCCCGACGAGAUCUUCAGAAGCGACACCCUGU | |
| | ACCUGACCCAGGACCUGUUCCUGCCCUUCUACAGCAACGU | |
| | GACCGGCUUCCACACCAUCAACCACAGAUUCGACAACCCC | |
| | GUGAUCCCCUUCAAGGACGGGGUGUACUUUGCCGCCACC | |
| | GAGAAGUCCAAUGUCGUGCGGGGAUGGGUGUUCGGCAGC | |
| | ACCAUGAACAACAAGAGCCAGAGCGUGAUCAUCAUCAAC | |
| | AACAGCACCAACGUCGUGAUCCGGGCCUGCAACUUCGAG | |
| | CUGUGCGACAACCCAUUCUUCGCCGUGUCCAAGCCCACCG | |
| | GCACCCAGACCCACACCAUGAUCUUCGACAACGCCUUCAA | |
| | CUGCACCUUCGAGUACAUCAGCGACAGCUUCAGCCUGGA | |
| | CGUGGCCGAGAAAAGCGGCAACUUCAAGCACCUGAGAGA | |
| | AUUCGUGUUCAAGAACAAGGACGGCUUCCUGUACGUGUA | |
| | CAAGGGCUACCAGCCCAUCGACGUCGUGCGCGAUCUGCCC | |
| | AGCGGCUUCAACAUCCUGAAGCCCAUCUUCAAGCUGCCCC | |
| | UGGGCAUCAACAUCACCAACUUCCGGGCUAUCCUGACCGC | |
| | CUUCCUGCCCGCCCAGGAUACCUGGGGAACAAGCGCCGCU | |
| | GCCUACUUCGUGGGCUACCUGAAGCCUGCCACCUUCAUGC | |
| | UGAAGUACGACGAGAACGGCACCAUCACCGACGCCGUGG | |
| | ACUGCAGCCAGAAUCCUCUGGCCGAGCUGAAGUGCAGCG | |
| | UGAAGUCCUUCGAGAUCGACAAGGGCAUCUACCAGACCA | |
| | GCAACUUCAGAGUGGCCCCCAGCAAAGAAGUCGUGCGGU | |
| | UCCCCAAUAUCACCAACCUGUGCCCCUUCGGCGAGGUGUU | |
| | CAACGCCACCACCUUUCCCAGCGUGUACGCCUGGGAGCGG | |
| | AAGCGGAUCAGCAACUGCGUGGCCGACUACAGCGUGCUG | |
| | UACAACUCCACCAGCUUCUCCACCUUCAAGUGCUACGGCG | |
| | UGUCCGCCACCAAGCUGAACGACCUGUGCUUCAGCAAUG | |
| | UGUACGCCGACUCCUUCGUCGUGAAGGGCGACGAUGUGC | |
| | GCCAGAUCGCCCCUGGACAGACAGGCGUGAUCGCCGAUU | |
| | ACAACUACAAGCUGCCUGACGACUUCACCGGCUGCGUGC | |
| | UGGCCUGGAACACCAGAAACAUCGACGCCACCCAGACAG | |
| | GCAACUACAAUUACAAGUACAGAAGCCUGCGGCACGGCA | |
| | AGCUGCGGCCCUUCGAGAGGGACAUCUCCAACGUGCCCU | |
| | UCAGCCCCGACGGCAAGCCUUGUACCCCCCCUGCCUUUAA | |
| | CUGCUACUGGCCCCUGAACGACUACGGCUUCUACAUCACA | |
| | AACGGCAUCGGCUAUCAGCCCUACCGGGUGGUGGUGCUG | |
| | UCCUUUGAGCUGCUGAAUGCCCCUGCCACCGUGUGCGGCC | |
| | CUAAGCUGAGCACCGACCUGAUCAAGAACCAGUGCGUGA | |
| | ACUUCAACUUCAACGGCCUGACCGGCACCGGCGUGCUGAC | |
| | ACCUAGCAGCAAGAGAUUCCAGCCCUUCCAGCAGUUCGG | |
| | CCGGGACGUGCUGGAUUUCACCGACAGCGUGCGGGACCC | |
| | CAAGACCAGCGAGAUCCUGGACAUCAGCCCCUGCAGCUUC | |
| | GGCGGAGUGUCCGUGAUCACCCCCGGCACCAAUACCAGCU | |
| | CUGAGGUGGCCGUGCUGUAUCAGGACGUGAACUGCACCG | |
| | AUGUGCCCGUGGCCAUCCACGCCGAUCAGCUGACCCCAUC | |
| | UUGGCGGGUGUACUCCACCGGCAACAACGUGUUCCAGAC | |
| | ACAAGCCGGCUGCCUGAUCGGAGCCGAGCACGUGGACAC | |
| | CAGCUACGAGUGCGACAUCCCUAUCGGCGCUGGCAUCUG | |
| | CGCCAGCUACCACACCGUGUCCAGCCUGAGAAGCACCAGC | |
| | CAGAAAUCUAUCGUGGCCUACACCAUGAGCCUGGGCGCC | |
| | GACAGCUCUAUCGCCUACUCCAACAACACAAUCGCCAUCC | |
| | CCACCAAUUUCAGCAUCUCCAUCACCACCGAAGUGAUGCC | |
| | CGUGUCCAUGGCCAAGACCUCCGUGGAUUGCAACAUGUA | |
| | CAUCUGCGGCGACAGCACCGAGUGCGCCAACCUGCUGCUG | |
| | CAGUACGGCAGCUUCUGCACCCAGCUGAACAGAGCCCUG | |
| | AGCGGAAUCGCCGUGGAACAGGACAGAAACACCCGGGAA | |
| | GUGUUCGCCCAAGUGAAGCAGAUGUAUAAGACCCCCACC | |
| | CUGAAGGAUUUCGGCGGCUUUAACUUCAGCCAGAUCCUG | |
| | CCCGACCCUCUGAAGCCUACCAAGCGGAGCUUCAUCGAGG | |
| | ACCUGCUGUUCAACAAAGUGACCCUGGCCGACGCCGGCU | |
| | UUAUGAAGCAGUAUGGCGAGUGCCUGGGCGACAUCAACG | |
| | CCCGGGAUCUGAUCUGCGCCCAGAAGUUUAACGGACUGA | |
| | CCGUGCUGCCCCCUCUGCUGACCGACGAUAUGAUCGCCGC | |
| | CUACACAGCCGCCCUGGUGUCUGGCACAGCUACCGCCGGA | |
| | UGGACAUUUGGAGCUGGCGCCGCUCUGCAGAUCCCCUUU | |
| | GCCAUGCAGAUGGCCUACCGGUUCAAUGGCAUCGGCGUG | |
| | ACCCAGAAUGUGCUGUACGAGAACCAGAAGCAGAUCGCC | |
| | AACCAGUUCAACAAGGCCAUUAGCCAGAUUCAGGAAAGC | |
| | CUGACCACCACCAGCACCGCCCUGGGCAAACUGCAGGACG | |
| | UCGUGAACCAGAACGCCCAGGCCCUGAACACCCUCGUGAA | |
| | GCAGCUGAGCAGCAAUUUCGGCGCCAUCAGCUCCGUGCU | |
| | GAACGAUAUCCUGAGCAGACUGGACAAGGUGGAAGCAGA | |
| | GGUGCAGAUCGACCGGCUGAUCACCGGCAGACUGCAGAG | |
| | CCUGCAGACCUACGUGACACAGCAGCUGAUUAGAGCCGC | |
| | CGAGAUCAGGGCCAGCGCCAAUCUGGCCGCCACAAAGAU | |
| | GAGCGAGUGUGUGCUGGGCCAGAGCAAGCGGGUGGACUU | |
| | CUGCGGCAAGGGCUAUCACCUGAUGAGCUUCCCCCAGGCC | |
| | GCUCCUCACGGCGUGGUGUUUCUGCACGUGACAUACGUG | |
| | CCCAGCCAGGAACGGAACUUCACCACCGCCCCAGCCAUCU | |
| | GCCACGAGGGCAAGGCCUACUUCCCCCGGGAAGGCGUGU | |
| | UCGUGUUUAACGGCACCUCCUGGUUUAUCACCCAGCGGA | |
| | AUUUCUUCAGUCCGCAGAUCAUCACCACAGACAACACCU | |
| | UCGUGUCCGGCAGCUGCGACGUCGUGAUUGGCAUCAUUA | |
| | ACAACACCGUGUACGACCCCCUGCAGCCCGAGCUGGACAG | |
| | CUUCAAAGAGGAACUGGACAAGUACUUCAAGAACCACAC | |
| | CUCCCCCGACGUGGACCUGGGCGAUAUCUCCGGCAUCAAU | |
| | GCCAGCGUCGUGAAUAUCCAGAAAGAGAUCGAUCGCCUG | |
| | AACGAGGUGGCCAAGAACCUGAAUGAGAGCCUGAUCGAC | |
| | CUGCAGGAACUGGGGAAGUACGAGCAGUACAUCAAGUGG | |
| | CCUUGGUACGUGUGGCUGGGCUUUAUCGCCGGCCUGAUC | |
| | GCCAUCGUGAUGGUCACCAUCCUGCUGUGCUGCAUGACC | |
| | AGCUGUUGCAGCUGUCUGAAGGGCGCCUGCAGCUGUGGC | |
| | UCCUGCUGCAAGUUCGAUGAGGACGACAGCGAGCCUGUG | |
| | CUGAAAGGCGUGAAGCUGCACUACACC | |
| 3′UTR | UGAUAAUAGGCUGGAGCCUCGGUGGCCUAGCUUCUUGCC | 4 |
| | CCUUGGGCCUCCCCCCAGCCCCUCCUCCCCUUCCUGCACC | |
| | CGUACCCCCGUGGUCUUUGAAUAAAGUCUGAGUGGGCGG | |
| | C | |
| Corresponding amino | MFIFLFFLTLTSGSDLESCTTFDDVQAPNYPQHSSSRRGVYYPD | 47 |
| acid sequence | EIFRSDTLYLTQDLFLPFYSNVTGFHTINHRFDNPVIPFKDGVY | |
| | FAATEKSNVVRGWVFGSTMNNKSQSVIIINNSTNVVIRACNFE | |
| | LCDNPFFAVSKPTGTQTHTMIFDNAFNCTFEYISDSFSLDVAEK | |
| | SGNFKHLREFVFKNKDGFLYVYKGYQPIDVVRDLPSGFNILKP | |
| | IFKLPLGINITNFRAILTAFLPAQDTWGTSAAAYFVGYLKPATF | |
| | MLKYDENGTITDAVDCSQNPLAELKCSVKSFEIDKGIYQTSNF | |
| | RVAPSKEVVRFPNITNLCPFGEVFNATTFPSVYAWERKRISNC | |
| | VADYSVLYNSTSFSTFKCYGVSATKLNDLCFSNVYADSFVVK | |
| | GDDVRQIAPGQTGVIADYNYKLPDDFTGCVLAWNTRNIDATQ | |
| | TGNYNYKYRSLRHGKLRPFERDISNVPFSPDGKPCTPPAFNCY | |
| | WPLNDYGFYITNGIGYQPYRVVVLSFELLNAPATVCGPKLSTD | |
| | LIKNQCVNFNFNGLTGTGVLTPSSKRFQPFQQFGRDVLDFTDS | |
| | VRDPKTSEILDISPCSFGGVSVITPGTNTSSEVAVLYQDVNCTD | |
| | VPVAIHADQLTPSWRVYSTGNNVFQTQAGCLIGAEHVDTSYE | |
| | CDIPIGAGICASYHTVSSLRSTSQKSIVAYTMSLGADSSIAYSN | |
| | NTIAIPTNFSISITTEVMPVSMAKTSVDCNMYICGDSTECANLL | |
| | LQYGSFCTQLNRALSGIAVEQDRNTREVFAQVKQMYKTPTLK | |
| | DFGGFNFSQILPDPLKPTKRSFIEDLLFNKVTLADAGFMKQYG | |
| | ECLGDINARDLICAQKFNGLTVLPPLLTDDMIAAYTAALVSGT | |
| | ATAGWTFGAGAALQIPFAMQMAYRFNGIGVTQNVLYENQKQ | |
| | IANQFNKAISQIQESLTTTSTALGKLQDVVNQNAQALNTLVKQ | |
| | LSSNFGAISSVLNDILSRLDKVEAEVQIDRLITGRLQSLQTYVT | |
| | QQLIRAAEIRASANLAATKMSECVLGQSKRVDFCGKGYHLMS | |
| | FPQAAPHGVVFLHVTYVPSQERNFTTAPAICHEGKAYFPREGV | |
| | FVFNGTSWFITQRNFFSPQIITTDNTFVSGSCDVVIGIINNTVYD | |
| | PLQPELDSFKEELDKYFKNHTSPDVDLGDISGINASVVNIQKEI | |
| | DRLNEVAKNLNESLIDLQELGKYEQYIKWPWYVWLGFIAGLI | |
| | AIVMVTILLCCMTSCCSCLKGACSCGSCCKFDEDDSEPVLKGV | |
| | KLHYT | |
| PolyA tail | 100 nt | |

WIV16 S Protein Variant 2

| SEQ ID NO: 58 consists of from 5′ end to 3′ end: 5′ UTR SEQ ID NO: 2, mRNA ORF SEQ ID | | 58 |
|---|---|---|
| NO: 50, and 3′ UTR SEQ ID NO: 4. | | |
| Chemistry | 1-methylpseudouridine | |
| Cap | 7mG(5′)ppp(5′)NlmpNp | |
| 5′UTR | GGGAAAUAAGAGAGAAAAGAAGAGUAAGAAGAAAUAUA | 2 |
| | AGACCCCGGCGCCGCCACC | |
| ORF of mRNA | AUGUUCAUCUUCCUGUUCUUCCUGACCCUGACCAGCGGC | 50 |
| Construct | AGCGACCUGGAGAGCUGCACCACCUUCGACGACGUGCAG | |
| (excluding the stop | GCCCCUAACUACCCUCAGCACAGCAGCAGCAGAAGAGGCG | |
| codon) | UGUACUACCCUGACGAGAUCUUCAGAAGCGACACCCUGU | |
| | ACCUGACCCAGGACCUGUUCCUGCCUUUCUACAGCAACGU | |
| | GACCGGCUUCCACACCAUCAACCACAGAUUCGACAACCCU | |
| | GUGAUCCCUUUCAAGGACGGCGUGUACUUCGCCGCCACC | |
| | GAGAAGAGCAACGUGGUGAGAGGCUGGGUGUUCGGCAGC | |
| | ACCAUGAACAACAAGAGCCAGAGCGUGAUCAUCAUCAAC | |
| | AACAGCACCAACGUGGUGAUCAGAGCCUGCAACUUCGAG | |
| | CUGUGCGACAACCCUUUCUUCGCCGUGAGCAAGCCUACCG | |
| | GCACCCAGACCCACACCAUGAUCUUCGACAACGCCUUCAA | |
| | CUGCACCUUCGAGUACAUCAGCGACAGCUUCAGCCUGGA | |
| | CGUGGCCGAGAAGAGCGGCAACUUCAAGCACCUGAGAGA | |
| | GUUCGUGUUCAAGAACAAGGACGGCUUCCUGUACGUGUA | |
| | CAAGGGCUACCAGCCUAUCGACGUGGUGAGAGACCUGCC | |
| | UAGCGGCUUCAACAUCCUGAAGCCUAUCUUCAAGCUGCC | |
| | UCUGGGCAUCAACAUCACCAACUUCAGAGCCAUCCUGACC | |
| | GCCUUCCUGCCUGCCCAGGACACCUGGGGCACCAGCGCCG | |
| | CCGCCUACUUCGUGGGCUACCUGAAGCCUGCCACCUUCAU | |
| | GCUGAAGUACGACGAGAACGGCACCAUCACCGACGCCGU | |
| | GGACUGCAGCCAGAACCCUCUGGCCGAGCUGAAGUGCAG | |
| | CGUGAAGAGCUUCGAGAUCGACAAGGGCAUCUACCAGAC | |
| | CAGCAACUUCAGAGUGGCCCCUAGCAAGGAGGUGGUGAG | |
| | AUUCCCUAACAUCACCAACCUGUGCCCUUUCGGCGAGGU | |
| | GUUCAACGCCACCACCUUCCCUAGCGUGUACGCCUGGGAG | |
| | AGAAAGAGAAUCAGCAACUGCGUGGCCGACUACAGCGUG | |
| | CUGUACAACAGCACCAGCUUCAGCACCUUCAAGUGCUAC | |
| | GGCGUGAGCGCCACCAAGCUGAACGACCUGUGCUUCAGC | |
| | AACGUGUACGCCGACAGCUUCGUGGUGAAGGGCGACGAC | |
| | GUGAGACAGAUCGCCCCUGGCCAGACCGGCGUGAUCGCC | |
| | GACUACAACUACAAGCUGCCUGACGACUUCACCGGCUGC | |
| | GUGCUGGCCUGGAACACCAGAAACAUCGACGCCACCCAG | |
| | ACCGGCAACUACAACUACAAGUACAGAAGCCUGAGACAC | |
| | GGCAAGCUGAGACCUUUCGAGAGAGACAUCAGCAACGUG | |
| | CCUUUCAGCCCUGACGGCAAGCCUUGCACCCCUCCUGCCU | |
| | UCAACUGCUACUGGCCUCUGAACGACUACGGCUUCUACA | |
| | UCACCAACGGCAUCGGCUACCAGCCUUACAGAGUGGUGG | |
| | UGCUGAGCUUCGAGCUGCUGAACGCCCCUGCCACCGUGU | |
| | GCGGCCCUAAGCUGAGCACCGACCUGAUCAAGAACCAGU | |
| | GCGUGAACUUCAACUUCAACGGCCUGACCGGCACCGGCG | |
| | UGCUGACCCCUAGCAGCAAGAGAUUCCAGCCUUUCCAGC | |
| | AGUUCGGCAGAGACGUGCUGGACUUCACCGACAGCGUGA | |
| | GAGACCCUAAGACCAGCGAGAUCCUGGACAUCAGCCCUU | |
| | GCAGCUUCGGCGGCGUGAGCGUGAUCACCCCUGGCACCA | |
| | ACACCAGCAGCGAGGUGGCCGUGCUGUACCAGGACGUGA | |
| | ACUGCACCGACGUGCCUGUGGCCAUCCACGCCGACCAGCU | |
| | GACCCCUAGCUGGAGAGUGUACAGCACCGGCAACAACGU | |
| | GUUCCAGACCCAGGCCGGCUGCCUGAUCGGCGCCGAGCAC | |
| | GUGGACACCAGCUACGAGUGCGACAUCCCUAUCGGCGCC | |
| | GGCAUCUGCGCCAGCUACCACACCGUGAGCAGCCUGAGA | |
| | AGCACCAGCCAGAAGAGCAUCGUGGCCUACACCAUGAGC | |
| | CUGGGCGCCGACAGCAGCAUCGCCUACAGCAACAACACCA | |
| | UCGCCAUCCCUACCAACUUCAGCAUCAGCAUCACCACCGA | |
| | GGUGAUGCCUGUGAGCAUGGCCAAGACCAGCGUGGACUG | |
| | CAACAUGUACAUCUGCGGCGACAGCACCGAGUGCGCCAA | |
| | CCUGCUGCUGCAGUACGGCAGCUUCUGCACCCAGCUGAAC | |
| | AGAGCCCUGAGCGGCAUCGCCGUGGAGCAGGACAGAAAC | |
| | ACCAGAGAGGUGUUCGCCCAGGUGAAGCAGAUGUACAAG | |
| | ACCCCUACCCUGAAGGACUUCGGCGGCUUCAACUUCAGCC | |
| | AGAUCCUGCCUGACCCUCUGAAGCCUACCAAGAGAAGCU | |
| | UCAUCGAGGACCUGCUGUUCAACAAGGUGACCCUGGCCG | |
| | ACGCCGGCUUCAUGAAGCAGUACGGCGAGUGCCUGGGCG | |
| | ACAUCAACGCCAGAGACCUGAUCUGCGCCCAGAAGUUCA | |
| | ACGGCCUGACCGUGCUGCCUCCUCUGCUGACCGACGACAU | |
| | GAUCGCCGCCUACACCGCCGCCCUGGUGAGCGGCACCGCC | |
| | ACCGCCGGCUGGACCUUCGGCGCCGGCGCCGCCCUGCAGA | |
| | UCCCUUUCGCCAUGCAGAUGGCCUACAGAUUCAACGGCA | |
| | UCGGCGUGACCCAGAACGUGCUGUACGAGAACCAGAAGC | |
| | AGAUCGCCAACCAGUUCAACAAGGCCAUCAGCCAGAUCC | |
| | AGGAGAGCCUGACCACCACCAGCACCGCCCUGGGCAAGCU | |
| | GCAGGACGUGGUGAACCAGAACGCCCAGGCCCUGAACAC | |
| | CCUGGUGAAGCAGCUGAGCAGCAACUUCGGCGCCAUCAG | |
| | CAGCGUGCUGAACGACAUCCUGAGCAGACUGGACCCUCC | |
| | UGAGGCCGAGGUGCAGAUCGACAGACUGAUCACCGGCAG | |
| | ACUGCAGAGCCUGCAGACCUACGUGACCCAGCAGCUGAU | |
| | CAGAGCCGCCGAGAUCAGAGCCAGCGCCAACCUGGCCGCC | |
| | ACCAAGAUGAGCGAGUGCGUGCUGGGCCAGAGCAAGAGA | |
| | GUGGACUUCUGCGGCAAGGGCUACCACCUGAUGAGCUUC | |
| | CCUCAGGCCGCCCCUCACGGCGUGGUGUUCCUGCACGUGA | |
| | CCUACGUGCCUAGCCAGGAGAGAAACUUCACCACCGCCCC | |
| | UGCCAUCUGCCACGAGGGCAAGGCCUACUUCCCUAGAGA | |
| | GGGCGUGUUCGUGUUCAACGGCACCAGCUGGUUCAUCAC | |
| | CCAGAGAAACUUCUUCAGCCCUCAGAUCAUCACCACCGAC | |
| | AACACCUUCGUGAGCGGCAGCUGCGACGUGGUGAUCGGC | |
| | AUCAUCAACAACACCGUGUACGACCCUCUGCAGCCUGAGC | |
| | UGGACAGCUUCAAGGAGGAGCUGGACAAGUACUUCAAGA | |
| | ACCACACCAGCCCUGACGUGGACCUGGGCGACAUCAGCGG | |
| | CAUCAACGCCAGCGUGGUGAACAUCCAGAAGGAGAUCGA | |
| | CAGACUGAACGAGGUGGCCAAGAACCUGAACGAGAGCCU | |
| | GAUCGACCUGCAGGAGCUGGGCAAGUACGAGCAGUACAU | |
| | CAAGUGGCCUUGGUACGUGUGGCUGGGCUUCAUCGCCGG | |
| | CCUGAUCGCCAUCGUGAUGGUGACCAUCCUGCUGUGCUG | |
| | CAUGACCAGCUGCUGCAGCUGCCUGAAGGGCGCCUGCAG | |
| | CUGCGGCAGCUGCUGCAAGUUCGACGAGGACGACAGCGA | |
| | GCCUGUGCUGAAGGGCGUGAAGCUGCACUACACC | |
| 3′UTR | UGAUAAUAGGCUGGAGCCUCGGUGGCCUAGCUUCUUGCC | 4 |
| | CCUUGGGCCUCCCCCCAGCCCCUCCUCCCCUUCCUGCACC | |
| | CGUACCCCCGUGGUCUUUGAAUAAAGUCUGAGUGGGCGG | |
| | C | |
| Corresponding amino | MFIFLFFLTLTSGSDLESCTTFDDVQAPNYPQHSSSRRGVYYPD | 49 |
| acid sequence | EIFRSDTLYLTQDLFLPFYSNVTGFHTINHRFDNPVIPFKDGVY | |
| | FAATEKSNVVRGWVFGSTMNNKSQSVIIINNSTNVVIRACNFE | |
| | LCDNPFFAVSKPTGTQTHTMIFDNAFNCTFEYISDSFSLDVAEK | |
| | SGNFKHLREFVFKNKDGFLYVYKGYQPIDVVRDLPSGFNILKP | |
| | IFKLPLGINITNFRAILTAFLPAQDTWGTSAAAYFVGYLKPATF | |
| | MLKYDENGTITDAVDCSQNPLAELKCSVKSFEIDKGIYQTSNF | |
| | RVAPSKEVVRFPNITNLCPFGEVFNATTFPSVYAWERKRISNC | |
| | VADYSVLYNSTSFSTFKCYGVSATKLNDLCFSNVYADSFVVK | |
| | GDDVRQIAPGQTGVIADYNYKLPDDFTGCVLAWNTRNIDATQ | |
| | TGNYNYKYRSLRHGKLRPFERDISNVPFSPDGKPCTPPAFNCY | |
| | WPLNDYGFYITNGIGYQPYRVVVLSFELLNAPATVCGPKLSTD | |
| | LIKNQCVNFNFNGLTGTGVLTPSSKRFQPFQQFGRDVLDFTDS | |
| | VRDPKTSEILDISPCSFGGVSVITPGTNTSSEVAVLYQDVNCTD | |
| | VPVAIHADQLTPSWRVYSTGNNVFQTQAGCLIGAEHVDTSYE | |
| | CDIPIGAGICASYHTVSSLRSTSQKSIVAYTMSLGADSSIAYSN | |
| | NTIAIPTNFSISITTEVMPVSMAKTSVDCNMYICGDSTECANLL | |
| | LQYGSFCTQLNRALSGIAVEQDRNTREVFAQVKQMYKTPTLK | |
| | DFGGFNFSQILPDPLKPTKRSFIEDLLFNKVTLADAGFMKQYG | |
| | ECLGDINARDLICAQKFNGLTVLPPLLTDDMIAAYTAALVSGT | |
| | ATAGWTFGAGAALQIPFAMQMAYRFNGIGVTQNVLYENQKQ | |
| | IANQFNKAISQIQESLTTTSTALGKLQDVVNQNAQALNTLVKQ | |
| | LSSNFGAISSVLNDILSRLDPPEAEVQIDRLITGRLQSLQTYVTQ | |
| | QLIRAAEIRASANLAATKMSECVLGQSKRVDFCGKGYHLMSF | |
| | PQAAPHGVVFLHVTYVPSQERNFTTAPAICHEGKAYFPREGVF | |
| | VFNGTSWFITQRNFFSPQIITTDNTFVSGSCDVVIGIINNTVYDP | |
| | LQPELDSFKEELDKYFKNHTSPDVDLGDISGINASVVNIQKEID | |
| | RLNEVAKNLNESLIDLQELGKYEQYIKWPWYVWLGFIAGLIAI | |
| | VMVTILLCCMTSCCSCLKGACSCGSCCKFDEDDSEPVLKGVK | |
| | LHYT | |
| PolyA tail | 100 nt | |

MERS S Protein Variant 1

| SEQ ID NO: 60 consists of from 5′ end to 3′ end: 5′ UTR SEQ ID NO: 2, mRNA ORF SEQ ID | | 60 |
|---|---|---|
| NO: 61, and 3′ UTR SEQ ID NO: 4. | | |
| Chemistry | 1-methylpseudouridine | |
| Cap | 7mG(5′)ppp(5′)NlmpNp | |
| 5′UTR | GGGAAAUAAGAGAGAAAAGAAGAGUAAGAAGAAAUAUA | 2 |
| | AGACCCCGGCGCCGCCACC | |
| ORF of mRNA | AUGAUCCACAGCGUGUUCCUGCUGAUGUUCCUCCUUACC | 61 |
| Construct | CCUACCGAGAGCUACGUGGACGUCGGCCCUGACAGCGUU | |
| (excluding the stop | AAGAGCGCUUGCAUCGAGGUGGACAUCCAGCAGACCUUC | |
| codon) | UUCGACAAGACCUGGCCUAGACCUAUCGACGUGAGCAAG | |
| | GCCGACGGCAUCAUCUACCCUCAGGGCAGAACCUACAGCA | |
| | ACAUCACCAUCACCUACCAGGGCCUGUUCCCUUAUCAGGG | |
| | CGACCACGGCGACAUGUACGUGUACAGCGCCGGCCACGCC | |
| | ACCGGCACAACGCCCCAGAAGCUUUUCGUGGCCAACUACU | |
| | CCCAGGACGUGAAGCAGUUCGCCAACGGCUUCGUGGUGA | |
| | GAAUCGGCGCCGCCGCCAACUCCACUGGAACCGUGAUCAU | |
| | CAGCCCUAGCACCAGCGCCACCAUCAGAAAGAUUUAUCCU | |
| | GCCUUUAUGCUGGGCUCCAGCGUGGGUAACUUCAGCGAC | |
| | GGCAAGAUGGGCAGAUUCUUCAACCACACCCUGGUGCUG | |
| | CUGCCUGACGGCUGCGGCACCCUGCUGAGAGCCUUCUACU | |
| | GCAUCCUGGAGCCUAGAAGCGGCAACCACUGCCCUGCCGG | |
| | CAACAGCUACACCAGCUUCGCAACCUAUCACACCCCUGCC | |
| | ACCGACUGUUCUGACGGUAACUACAACAGAAACGCCAGC | |
| | CUGAACAGCUUCAAGGAGUACUUCAACCUGAGAAACUGC | |
| | ACCUUCAUGUACACCUAUAAUAUCACCGAGGACGAGAUC | |
| | CUCGAGUGGUUCGGCAUAACCCAGACCGCCCAAGGCGUG | |
| | CACCUGUUCAGCAGCAGAUACGUUGAUCUGUACGGCGGC | |
| | AACAUGUUCCAGUUCGCUACCCUGCCUGUGUACGACACC | |
| | AUCAAGUACUACAGCAUCAUCCCUCAUUCUAUUAGAAGC | |
| | AUCCAGAGCGACAGAAAGGCCUGGGCCGCUUUCUACGUA | |
| | UACAAGCUGCAGCCUCUCACAUUCUUGCUCGACUUCUCU | |
| | GUGGACGGCUAUAUCCGCAGGGCCAUCGACUGCGGCUUC | |
| | AACGACCUGAGCCAGCUGCACUGCAGCUACGAGAGCUUC | |
| | GACGUGGAGAGCGGAGUUUAUUCCGUGAGCAGCUUCGAG | |
| | GCCAAGCCUAGCGGCUCUGUAGUGGAGCAGGCCGAGGGC | |
| | GUGGAGUGCGAUUUCAGCCCUCUGCUGAGCGGUACCCCU | |
| | CCUCAGGUGUACAACUUCAAGAGACUGGUGUUCACGAAC | |
| | UGCAACUACAAUCUGACCAAACUGCUUUCGCUUUUCUCC | |
| | GUGAACGACUUCACCUGCAGCCAGAUUUCUCCGGCAGCC | |
| | AUCGCCAGCAACUGCUACAGCAGCUUGAUCCUUGACUAC | |
| | UUCAGCUACCCUCUGAGCAUGAAGUCCGACUUAAGUGUA | |
| | UCCUCAGCCGGCCCUAUCAGCCAGUUCAAUUACAAGCAG | |
| | AGCUUCAGCAACCCUACCUGCCUAAUUUUGGCCACCGUGC | |
| | CUCACAACCUGACUACAAUUACCAAGCCACUCAAGUAUU | |
| | CCUACAUUAACAAGUGUAGCCGAUUCCUGAGCGACGACA | |
| | GAACCGAGGUGCCUCAGCUGGUGAACGCCAACCAGUACA | |
| | GCCCUUGCGUGUCGAUCGUGCCAAGUACCGUGUGGGAGG | |
| | ACGGCGACUACUACAGAAAGCAGCUGUCUCCUCUCGAAG | |
| | GCGGCGGGUGGCUGGUGGCAAGCGGAAGCACAGUGGCCA | |
| | UGACCGAGCAGCUGCAGAUGGGCUUCGGAAUUACCGUGC | |
| | AGUACGGCACCGACACCAAUAGUGUCUGCCCUAAGCUGG | |
| | AAUUCGCGAACGACACUAAGAUUGCCUCCCAACUGGGAA | |
| | AUUGCGUAGAGUACUCUCUGUACGGAGUGUCCGGCAGAG | |
| | GUGUCUUCCAGAAUUGCACAGCCGUGGGCGUGAGACAGC | |
| | AGAGAUUCGUCUACGACGCCUACCAGAACCUGGUGGGCU | |
| | AUUAUAGUGACGACGGCAACUACUACUGCCUGCGGGCCU | |
| | GCGUUAGUGUGCCUGUCUCCGUUAUCUACGACAAGGAGA | |
| | CAAAGACUCACGCCACACUUUUCGGAUCUGUCGCCUGCG | |
| | AGCACAUCAGUAGUACCAUGUCUCAGUAUAGCAGAAGCA | |
| | CCAGGUCUAUGCUGAAGAGACGGGACUCAACCUACGGAC | |
| | CACUUCAGACCCCUGUGGGCUGCGUGCUGGGCCUCGUAA | |
| | AUAGCUCUCUGUUUGUGGAGGACUGUAAACUGCCACUGG | |
| | GCCAGAGCCUGUGUGCUUUACCUGACACACCUAGUACAC | |
| | UGACACCAGCGAGCGUGGGUAGUGUACCAGGCGAGAUGA | |
| | GACUGGCCAGCAUCGCUUUCAAUCACCCUAUCCAGGUGG | |
| | ACCAGCUCAAUUCCUCUUACUUCAAGCUGAGCAUCCCUAC | |
| | CAAUUUCUCUUUCGGCGUGACCCAGGAGUACAUCCAGAC | |
| | CACAAUACAGAAGGUGACCGUAGAUUGCAAGCAGUACGU | |
| | GUGUAACGGAUUCCAGAAGUGCGAGCAAUUGCUCAGGGA | |
| | GUACGGCCAGUUCUGUAGCAAGAUCAACCAGGCUCUGCA | |
| | CGGGGCCAAUCUGCGACAGGACGACAGCGUAAGAAACCU | |
| | GUUCGCCAGCGUAAAGUCUAGCCAGUCGAGUCCAAUCAU | |
| | ACCAGGCUUCGGCGGAGAUUUCAAUCUCACCUUAUUGGA | |
| | GCCAGUUUCCAUCUCUACGGGUUCGAGGAGCGCUAGGAG | |
| | CGCAAUCGAGGACCUGCUGUUCGAUAAGGUCACCAUCGC | |
| | CGACCCUGGCUACAUGCAGGGCUACGACGACUGCAUGCA | |
| | GCAGGGCCCAGCCUCCGCCAGAGAUCUGAUCUGCGCCCAG | |
| | UACGUCGCCGGCUACAAGGUGCUGCCUCCUCUGAUGGAC | |
| | GUUAACAUGGAGGCCGCCUAUACUAGUAGUCUUCUGGGA | |
| | AGCAUUGCAGGCGUGGGCUGGACCGCCGGCCUGUCUAGC | |
| | UUCGCGGCCAUACCUUUCGCCCAGAGCAUCUUCUACAGAC | |
| | UGAACGGUGUGGGCAUCACACAACAGGUACUGUCUGAGA | |
| | AUCAGAAGCUGAUCGCCAACAAGUUCAAUCAGGCACUUG | |
| | GCGCCAUGCAGACCGGCUUCACCACCACCAACGAGGCCUU | |
| | CCACAAGGUCCAGGACGCCGUGAACAACAACGCUCAGGCC | |
| | UUGAGCAAGUUAGCGAGCGAACUUAGCAACACCUUCGGC | |
| | GCCAUCAGUGCAAGCAUUGGAGACAUUAUCCAGAGGCUC | |
| | GACCCUCCUGAGCAGGACGCUCAGAUCGAUCGGUUGAUC | |
| | AACGGCAGACUGACCACUCUGAACGCCUUCGUUGCCCAAC | |
| | AACUGGUGCGGUCUGAGAGCGCCGCUUUAUCCGCCCAGC | |
| | UGGCCAAGGACAAGGUUAACGAGUGCGUGAAGGCACAGU | |
| | CGAAGCGUUCAGGAUUCUGCGGCCAGGGCACCCACAUCG | |
| | UGAGCUUCGUCGUGAACGCCCCUAACGGCCUGUACUUCA | |
| | UGCACGUCGGAUAUUACCCUAGCAACCAUAUUGAAGUGG | |
| | UGAGCGCGUACGGCCUCUGUGACGCAGCUAAUCCUACAA | |
| | ACUGCAUCGCCCCUGUGAACGGUUACUUCAUCAAGACCA | |
| | ACAACACCAGAAUCGUGGACGAGUGGUCAUACACGGGCA | |
| | GUUCAUUCUACGCCCCUGAGCCGAUCACUAGCCUUAACAC | |
| | CAAGUACGUGGCCCCACAAGUGACAUACCAGAACAUUAG | |
| | CACAAACCUGCCUCCACCGCUGUUAGGUAACAGCACGGGC | |
| | AUCGACUUCCAGGACGAAUUAGACGAGUUCUUCAAGAAC | |
| | GUGUCCACCAGCAUCCCAAACUUCGGCAGCCUGACCCAGA | |
| | UCAACACAACCUUACUCGACCUGACCUACGAGAUGCUGA | |
| | GCCUCCAGCAGGUUGUCAAGGCCCUCAACGAAUCAUAUA | |
| | UCGACUUGAAGGAGCUUGGCAAUUACACUUACUACAACA | |
| | AGUGGCCUUGGUACAUCUGGCUCGGCUUCAUCGCCGGGC | |
| | UGGUCGCCCUCGCCCUGUGCGUCUUCUUCAUCCUGUGCUG | |
| | CACAGGUUGUGGAACCAACUGUAUGGGCAAGCUGAAGUG | |
| | CAACCGUUGCUGUGAUAGAUACGAGGAGUACGAUCUGGA | |
| | ACCACAUAAGGUGCACGUGCAC | |
| 3′UTR | UGAUAAUAGGCUGGAGCCUCGGUGGCCUAGCUUCUUGCC | 4 |
| | CCUUGGGCCUCCCCCCAGCCCCUCCUCCCCUUCCUGCACC | |
| | CGUACCCCCGUGGUCUUUGAAUAAAGUCUGAGUGGGCGG | |
| | C | |
| Corresponding amino | MIHSVFLLMFLLTPTESYVDVGPDSVKSACIEVDIQQTFFDKT | 59 |
| acid sequence | WPRPIDVSKADGIIYPQGRTYSNITITYQGLFPYQGDHGDMYV | |
| | YSAGHATGTTPQKLFVANYSQDVKQFANGFVVRIGAAANST | |
| | GTVIISPSTSATIRKIYPAFMLGSSVGNFSDGKMGRFFNHTLVL | |
| | LPDGCGTLLRAFYCILEPRSGNHCPAGNSYTSFATYHTPATDC | |
| | SDGNYNRNASLNSFKEYFNLRNCTFMYTYNITEDEILEWFGIT | |
| | QTAQGVHLFSSRYVDLYGGNMFQFATLPVYDTIKYYSIIPHSI | |
| | RSIQSDRKAWAAFYVYKLQPLTFLLDFSVDGYIRRAIDCGFND | |
| | LSQLHCSYESFDVESGVYSVSSFEAKPSGSVVEQAEGVECDFS | |
| | PLLSGTPPQVYNFKRLVFTNCNYNLTKLLSLFSVNDFTCSQISP | |
| | AAIASNCYSSLILDYFSYPLSMKSDLSVSSAGPISQFNYKQSFS | |
| | NPTCLILATVPHNLTTITKPLKYSYINKCSRFLSDDRTEVPQLV | |
| | NANQYSPCVSIVPSTVWEDGDYYRKQLSPLEGGGWLVASGST | |
| | VAMTEQLQMGFGITVQYGTDTNSVCPKLEFANDTKIASQLGN | |
| | CVEYSLYGVSGRGVFQNCTAVGVRQQRFVYDAYQNLVGYYS | |
| | DDGNYYCLRACVSVPVSVIYDKETKTHATLFGSVACEHISST | |
| | MSQYSRSTRSMLKRRDSTYGPLQTPVGCVLGLVNSSLFVEDC | |
| | KLPLGQSLCALPDTPSTLTPASVGSVPGEMRLASIAFNHPIQVD | |
| | QLNSSYFKLSIPTNFSFGVTQEYIQTTIQKVTVDCKQYVCNGF | |
| | QKCEQLLREYGQFCSKINQALHGANLRQDDSVRNLFASVKSS | |
| | QSSPIIPGFGGDFNLTLLEPVSISTGSRSARSAIEDLLFDKVTIAD | |
| | PGYMQGYDDCMQQGPASARDLICAQYVAGYKVLPPLMDVN | |
| | MEAAYTSSLLGSIAGVGWTAGLSSFAAIPFAQSIFYRLNGVGIT | |
| | QQVLSENQKLIANKFNQALGAMQTGFTTTNEAFHKVQDAVN | |
| | NNAQALSKLASELSNTFGAISASIGDIIQRLDPPEQDAQIDRLIN | |
| | GRLTTLNAFVAQQLVRSESAALSAQLAKDKVNECVKAQSKR | |
| | SGFCGQGTHIVSFVVNAPNGLYFMHVGYYPSNHIEVVSAYGL | |
| | CDAANPTNCIAPVNGYFIKTNNTRIVDEWSYTGSSFYAPEPITS | |
| | LNTKYVAPQVTYQNISTNLPPPLLGNSTGIDFQDELDEFFKNV | |
| | STSIPNFGSLTQINTTLLDLTYEMLSLQQVVKALNESYIDLKEL | |
| | GNYTYYNKWPWYIWLGFIAGLVALALCVFFILCCTGCGTNC | |
| | MGKLKCNRCCDRYEEYDLEPHKVHVH | |
| PolyA tail | 100 nt | |

SARS-CoV-2 Variant 25

| SEQ ID NO: 86 consists of from 5′ end to 3′ end: 5′ UTR SEQ ID NO: 2, mRNA ORF SEQ ID | | 86 |
|---|---|---|
| NO: 62, and 3′ UTR SEQ ID NO: 4. | | |
| Chemistry | 1-methylpseudouridine | |
| Cap | 7mG(5′)ppp(5′)NlmpNp | |
| 5′UTR | GGGAAAUAAGAGAGAAAAGAAGAGUAAGAAGAAAUAUA | 2 |
| | AGACCCCGGCGCCGCCACC | |
| ORF of mRNA | AUGUUCGUGUUCCUGGUGCUGCUGCCCCUGGUGAGCAGC | 62 |
| Construct | CAGUGCGUGAACCUGACCACCCGGACCCAGCUGCCACCAG | |
| (excluding the stop | CCUACACCAACAGCUUCACCCGGGGCGUCUACUACCCCGA | |
| codon) | CAAGGUGUUCCGGAGCAGCGUCCUGCACAGCACCCAGGA | |
| | CCUGUUCCUGCCCUUCUUCAGCAACGUGACCUGGUUCCAC | |
| | GCCAUCCACGUGAGCGGCACCAACGGCACCAAGCGGUUCG | |
| | ACAACCCCGUGCUGCCCUUCAACGACGGCGUGUACUUCGC | |
| | CAGCACCGAGAAGAGCAACAUCAUCCGGGGCUGGAUCUU | |
| | CGGCACCACCCUGGACAGCAAGACCCAGAGCCUGCUGAUC | |
| | GUGAAUAACGCCACCAACGUGGUGAUCAAGGUGUGCGAG | |
| | UUCCAGUUCUGCAACGACCCCUUCCUGGGCGUGUACUACC | |
| | ACAAGAACAACAAGAGCUGGAUGGAGAGCGAGUUCCGGG | |
| | UGUACAGCAGCGCCAACAACUGCACCUUCGAGUACGUGA | |
| | GCCAGCCCUUCCUGAUGGACCUGGAGGGCAAGCAGGGCA | |
| | ACUUCAAGAACCUGCGGGAGUUCGUGUUCAAGAACAUCG | |
| | ACGGCUACUUCAAGAUCUACAGCAAGCACACCCCAAUCA | |
| | ACCUGGUGCGGGAUCUGCCCCAGGGCUUCUCAGCCCUGG | |
| | AGCCCCUGGUGGACCUGCCCAUCGGCAUCAACAUCACCCG | |
| | GUUCCAGACCCUGCUGGCCCUGCACCGGAGCUACCUGACC | |
| | CCAGGCGACAGCAGCAGCGGGUGGACAGCAGGCGCGGCU | |
| | GCUUACUACGUGGGCUACCUGCAGCCCCGGACCUUCCUGC | |
| | UGAAGUACAACGAGAACGGCACCAUCACCGACGCCGUGG | |
| | ACUGCGCCCUGGACCCUCUGAGCGAGACCAAGUGCACCCU | |
| | GAAGAGCUUCACCGUGGAGAAGGGCAUCUACCAGACCAG | |
| | CAACUUCCGGGUGCAGCCCACCGAGAGCAUCGUGCGGUU | |
| | CCCCAACAUCACCAACCUGUGCCCCUUCGGCGAGGUGUUC | |
| | AACGCCACCCGGUUCGCCAGCGUGUACGCCUGGAACCGGA | |
| | AGCGGAUCAGCAACUGCGUGGCCGACUACAGCGUGCUGU | |
| | ACAACAGCGCCAGCUUCAGCACCUUCAAGUGCUACGGCG | |
| | UGAGCCCCACCAAGCUGAACGACCUGUGCUUCACCAACGU | |
| | GUACGCCGACAGCUUCGUGAUCCGUGGCGACGAGGUGCG | |
| | GCAGAUCGCACCCGGCCAGACAGGCAAGAUCGCCGACUAC | |
| | AACUACAAGCUGCCCGACGACUUCACCGGCUGCGUGAUC | |
| | GCCUGGAACAGCAACAACCUCGACAGCAAGGUGGGCGGC | |
| | AACUACAACUACCUGUACCGGCUGUUCCGGAAGAGCAAC | |
| | CUGAAGCCCUUCGAGCGGGACAUCAGCACCGAGAUCUAC | |
| | CAAGCCGGCUCCACCCCUUGCAACGGCGUGGAGGGCUUCA | |
| | ACUGCUACUUCCCUCUGCAGAGCUACGGCUUCCAGCCCAC | |
| | CAACGGCGUGGGCUACCAGCCCUACCGGGUGGUGGUGCU | |
| | GAGCUUCGAGCUGCUGCACGCCCCAGCCACCGUGUGUGGC | |
| | CCCAAGAAGAGCACCAACCUGGUGAAGAACAAGUGCGUG | |
| | AACUUCAACUUCAACGGCCUUACCGGCACCGGCGUGCUG | |
| | ACCGAGAGCAACAAGAAAUUCCUGCCCUUUCAGCAGUUC | |
| | GGCCGGGACAUCGCCGACACCACCGACGCUGUGCGGGAUC | |
| | CCCAGACCCUGGAGAUCCUGGACAUCACCCCUUGCAGCUU | |
| | CGGCGGCGUGAGCGUGAUCACCCCAGGCACCAACACCAGC | |
| | AACCAGGUGGCCGUGCUGUACCAGGACGUGAACUGCACC | |
| | GAGGUGCCCGUGGCCAUCCACGCCGACCAGCUGACACCCA | |
| | CCUGGCGGGUCUACAGCACCGGCAGCAACGUGUUCCAGA | |
| | CCCGGGCCGGUUGCCUGAUCGGCGCCGAGCACGUGAACA | |
| | ACAGCUACGAGUGCGACAUCCCCAUCGGCGCCGGCAUCUG | |
| | UGCCAGCUACCAGACCCAGACCGUGUCACUGAGGAGCGU | |
| | GGCCAGCCAGAGCAUCAUCGCCUACACCAUGAGCCUGGGC | |
| | GCCGAGAACAGCGUGGCCUACAGCAACAACAGCAUCGCC | |
| | AUCCCCACCAACUUCACCAUCAGCGUGACCACCGAGAUUC | |
| | UGCCCGUGAGCAUGACCAAGACCAGCGUGGACUGCACCA | |
| | UGUACAUCUGCGGCGACAGCACCGAGUGCAGCAACCUGC | |
| | UGCUGCAGUACGGCAGCUUCUGCACCCAGCUGAACCGGG | |
| | CCCUGACCGGCAUCGCCGUGGAGCAGGACAAGAACACCCA | |
| | GGAGGUGUUCGCCCAGGUGAAGCAGAUCUACAAGACCCC | |
| | UCCCAUCAAGGACUUCGGCGGCUUCAACUUCAGCCAGAU | |
| | CCUGCCCGACCCCAGCAAGCCCAGCAAGCGGAGCUUCAUC | |
| | GAGGACCUGCUGUUCAACAAGGUGACCCUAGCCGACGCC | |
| | GGCUUCAUCAAGCAGUACGGCGACUGCCUCGGCGACAUA | |
| | GCCGCCCGGGACCUGAUCUGCGCCCAGAAGUUCAACGGCC | |
| | UGACCGUGCUGCCUCCCCUGCUGACCGACGAGAUGAUCGC | |
| | CCAGUACACCAGCGCCCUGUUAGCCGGAACCAUCACCAGC | |
| | GGCUGGACUUUCGGCGCUGGAGCCGCUCUGCAGAUCCCC | |
| | UUCGCCAUGCAGAUGGCCUACCGGUUCAACGGCAUCGGC | |
| | GUGACCCAGAACGUGCUGUACGAGAACCAGAAGCUGAUC | |
| | GCCAACCAGUUCAACAGCGCCAUCGGCAAGAUCCAGGAC | |
| | AGCCUGAGCAGCACCGCUAGCGCCCUGGGCAAGCUGCAG | |
| | GACGUGGUGAACCAGAACGCCCAGGCCCUGAACACCCUG | |
| | GUGAAGCAGCUGAGCAGCAACUUCGGCGCCAUCAGCAGC | |
| | GUGCUGAACGACAUCCUGAGCCGGCUGGACAAGGUGGAG | |
| | GCCGAGGUGCAGAUCGACCGGCUGAUCACUGGCCGGCUG | |
| | CAGAGCCUGCAGACCUACGUGACCCAGCAGCUGAUCCGG | |
| | GCCGCCGAGAUUCGGGCCAGCGCCAACCUGGCCGCCACCA | |
| | AGAUGAGCGAGUGCGUGCUGGGCCAGAGCAAGCGGGUGG | |
| | ACUUCUGCGGCAAGGGCUACCACCUGAUGAGCUUUCCCC | |
| | AGAGCGCACCCCACGGAGUGGUGUUCCUGCACGUGACCU | |
| | ACGUGCCCGCCCAGGAGAAGAACUUCACCACCGCCCCAGC | |
| | CAUCUGCCACGACGGCAAGGCCCACUUUCCCCGGGAGGGC | |
| | GUGUUCGUGAGCAACGGCACCCACUGGUUCGUGACCCAG | |
| | CGGAACUUCUACGAGCCCCAGAUCAUCACCACCGACAACA | |
| | CCUUCGUGAGCGGCAACUGCGACGUGGUGAUCGGCAUCG | |
| | UGAACAACACCGUGUACGAUCCCCUGCAGCCCGAGCUGG | |
| | ACAGCUUCAAGGAGGAGCUGGACAAGUACUUCAAGAAUC | |
| | ACACCAGCCCCGACGUGGACCUGGGCGACAUCAGCGGCAU | |
| | CAACGCCAGCGUGGUGAACAUCCAGAAGGAGAUCGAUCG | |
| | GCUGAACGAGGUGGCCAAGAACCUGAACGAGAGCCUGAU | |
| | CGACCUGCAGGAGCUGGGCAAGUACGAGCAGUACAUCAA | |
| | GUGGCCCUGGUACAUCUGGCUGGGCUUCAUCGCCGGCCU | |
| | GAUCGCCAUCGUGAUGGUGACCAUCAUGCUG | |
| 3′UTR | UGAUAAUAGGCUGGAGCCUCGGUGGCCUAGCUUCUUGCC | 4 |
| | CCUUGGGCCUCCCCCCAGCCCCUCCUCCCCUUCCUGCACC | |
| | CGUACCCCCGUGGUCUUUGAAUAAAGUCUGAGUGGGCGG | |
| | C | |
| Corresponding amino | MFVFLVLLPLVSSQCVNLTTRTQLPPAYTNSFTRGVYYPDKVF | 63 |
| acid sequence | RSSVLHSTQDLFLPFFSNVTWFHAIHVSGTNGTKRFDNPVLPF | |
| | NDGVYFASTEKSNIIRGWIFGTTLDSKTQSLLIVNNATNVVIKV | |
| | CEFQFCNDPFLGVYYHKNNKSWMESEFRVYSSANNCTFEYVS | |
| | QPFLMDLEGKQGNFKNLREFVFKNIDGYFKIYSKHTPINLVRD | |
| | LPQGFSALEPLVDLPIGINITRFQTLLALHRSYLTPGDSSSGWT | |
| | AGAAAYYVGYLQPRTFLLKYNENGTITDAVDCALDPLSETKC | |
| | TLKSFTVEKGIYQTSNFRVQPTESIVRFPNITNLCPFGEVFNATR | |
| | FASVYAWNRKRISNCVADYSVLYNSASFSTFKCYGVSPTKLN | |
| | DLCFTNVYADSFVIRGDEVRQIAPGQTGKIADYNYKLPDDFTG | |
| | CVIAWNSNNLDSKVGGNYNYLYRLFRKSNLKPFERDISTEIYQ | |
| | AGSTPCNGVEGFNCYFPLQSYGFQPTNGVGYQPYRVVVLSFE | |
| | LLHAPATVCGPKKSTNLVKNKCVNFNFNGLTGTGVLTESNKK | |
| | FLPFQQFGRDIADTTDAVRDPQTLEILDITPCSFGGVSVITPGTN | |
| | TSNQVAVLYQDVNCTEVPVAIHADQLTPTWRVYSTGSNVFQT | |
| | RAGCLIGAEHVNNSYECDIPIGAGICASYQTQTVSLRSVASQSII | |
| | AYTMSLGAENSVAYSNNSIAIPTNFTISVTTEILPVSMTKTSVD | |
| | CTMYICGDSTECSNLLLQYGSFCTQLNRALTGIAVEQDKNTQE | |
| | VFAQVKQIYKTPPIKDFGGFNFSQILPDPSKPSKRSFIEDLLFNK | |
| | VTLADAGFIKQYGDCLGDIAARDLICAQKFNGLTVLPPLLTDE | |
| | MIAQYTSALLAGTITSGWTFGAGAALQIPFAMQMAYRFNGIG | |
| | VTQNVLYENQKLIANQFNSAIGKIQDSLSSTASALGKLQDVVN | |
| | QNAQALNTLVKQLSSNFGAISSVLNDILSRLDKVEAEVQIDRLI | |
| | TGRLQSLQTYVTQQLIRAAEIRASANLAATKMSECVLGQSKR | |
| | VDFCGKGYHLMSFPQSAPHGVVFLHVTYVPAQEKNFTTAPAI | |
| | CHDGKAHFPREGVFVSNGTHWFVTQRNFYEPQIITTDNTFVSG | |
| | NCDVVIGIVNNTVYDPLQPELDSFKEELDKYFKNHTSPDVDLG | |
| | DISGINASVVNIQKEIDRLNEVAKNLNESLIDLQELGKYEQYIK | |
| | WPWYIWLGFIAGLIAIVMVTIML | |
| PolyA tail | 100 nt | |

SARS-CoV-2 Variant 26

| SEQ ID NO: 87 consists of from 5′ end to 3′ end: 5′ UTR SEQ ID NO: 2, mRNA ORF SEQ ID | | 87 |
|---|---|---|
| NO: 64, and 3′ UTR SEQ ID NO: 4. | | |
| Chemistry | 1-methylpseudouridine | |
| Cap | 7mG(5′)ppp(5′)NlmpNp | |
| 5′UTR | GGGAAAUAAGAGAGAAAAGAAGAGUAAGAAGAAAUAUA | 2 |
| | AGACCCCGGCGCCGCCACC | |
| ORF of mRNA | AUGUUCGUGUUCCUGGUGCUGCUGCCCCUGGUGAGCAGC | 64 |
| Construct | CAGUGCGUGAACCUGACCACCCGGACCCAGCUGCCACCAG | |
| (excluding the stop | CCUACACCAACAGCUUCACCCGGGGCGUCUACUACCCCGA | |
| codon) | CAAGGUGUUCCGGAGCAGCGUCCUGCACAGCACCCAGGA | |
| | CCUGUUCCUGCCCUUCUUCAGCAACGUGACCUGGUUCCAC | |
| | GCCAUCCACGUGAGCGGCACCAACGGCACCAAGCGGUUCG | |
| | ACAACCCCGUGCUGCCCUUCAACGACGGCGUGUACUUCGC | |
| | CAGCACCGAGAAGAGCAACAUCAUCCGGGGCUGGAUCUU | |
| | CGGCACCACCCUGGACAGCAAGACCCAGAGCCUGCUGAUC | |
| | GUGAAUAACGCCACCAACGUGGUGAUCAAGGUGUGCGAG | |
| | UUCCAGUUCUGCAACGACCCCUUCCUGGGCGUGUACUACC | |
| | ACAAGAACAACAAGAGCUGGAUGGAGAGCGAGUUCCGGG | |
| | UGUACAGCAGCGCCAACAACUGCACCUUCGAGUACGUGA | |
| | GCCAGCCCUUCCUGAUGGACCUGGAGGGCAAGCAGGGCA | |
| | ACUUCAAGAACCUGCGGGAGUUCGUGUUCAAGAACAUCG | |
| | ACGGCUACUUCAAGAUCUACAGCAAGCACACCCCAAUCA | |
| | ACCUGGUGCGGGAUCUGCCCCAGGGCUUCUCAGCCCUGG | |
| | AGCCCCUGGUGGACCUGCCCAUCGGCAUCAACAUCACCCG | |
| | GUUCCAGACCCUGCUGGCCCUGCACCGGAGCUACCUGACC | |
| | CCAGGCGACAGCAGCAGCGGGUGGACAGCAGGCGCGGCU | |
| | GCUUACUACGUGGGCUACCUGCAGCCCCGGACCUUCCUGC | |
| | UGAAGUACAACGAGAACGGCACCAUCACCGACGCCGUGG | |
| | ACUGCGCCCUGGACCCUCUGAGCGAGACCAAGUGCACCCU | |
| | GAAGAGCUUCACCGUGGAGAAGGGCAUCUACCAGACCAG | |
| | CAACUUCCGGGUGCAGCCCACCGAGAGCAUCGUGCGGUU | |
| | CCCCAACAUCACCAACCUGUGCCCCUUCGGCGAGGUGUUC | |
| | AACGCCACCCGGUUCGCCAGCGUGUACGCCUGGAACCGGA | |
| | AGCGGAUCAGCAACUGCGUGGCCGACUACAGCGUGCUGU | |
| | ACAACAGCGCCAGCUUCAGCACCUUCAAGUGCUACGGCG | |
| | UGAGCCCCACCAAGCUGAACGACCUGUGCUUCACCAACGU | |
| | GUACGCCGACAGCUUCGUGAUCCGUGGCGACGAGGUGCG | |
| | GCAGAUCGCACCCGGCCAGACAGGCAAGAUCGCCGACUAC | |
| | AACUACAAGCUGCCCGACGACUUCACCGGCUGCGUGAUC | |
| | GCCUGGAACAGCAACAACCUCGACAGCAAGGUGGGCGGC | |
| | AACUACAACUACCUGUACCGGCUGUUCCGGAAGAGCAAC | |
| | CUGAAGCCCUUCGAGCGGGACAUCAGCACCGAGAUCUAC | |
| | CAAGCCGGCUCCACCCCUUGCAACGGCGUGGAGGGCUUCA | |
| | ACUGCUACUUCCCUCUGCAGAGCUACGGCUUCCAGCCCAC | |
| | CAACGGCGUGGGCUACCAGCCCUACCGGGUGGUGGUGCU | |
| | GAGCUUCGAGCUGCUGCACGCCCCAGCCACCGUGUGUGGC | |
| | CCCAAGAAGAGCACCAACCUGGUGAAGAACAAGUGCGUG | |
| | AACUUCAACUUCAACGGCCUUACCGGCACCGGCGUGCUG | |
| | ACCGAGAGCAACAAGAAAUUCCUGCCCUUUCAGCAGUUC | |
| | GGCCGGGACAUCGCCGACACCACCGACGCUGUGCGGGAUC | |
| | CCCAGACCCUGGAGAUCCUGGACAUCACCCCUUGCAGCUU | |
| | CGGCGGCGUGAGCGUGAUCACCCCAGGCACCAACACCAGC | |
| | AACCAGGUGGCCGUGCUGUACCAGGACGUGAACUGCACC | |
| | GAGGUGCCCGUGGCCAUCCACGCCGACCAGCUGACACCCA | |
| | CCUGGCGGGUCUACAGCACCGGCAGCAACGUGUUCCAGA | |
| | CCCGGGCCGGUUGCCUGAUCGGCGCCGAGCACGUGAACA | |
| | ACAGCUACGAGUGCGACAUCCCCAUCGGCGCCGGCAUCUG | |
| | UGCCAGCUACCAGACCCAGACCGUGUCACUGAGGAGCGU | |
| | GGCCAGCCAGAGCAUCAUCGCCUACACCAUGAGCCUGGGC | |
| | GCCGAGAACAGCGUGGCCUACAGCAACAACAGCAUCGCC | |
| | AUCCCCACCAACUUCACCAUCAGCGUGACCACCGAGAUUC | |
| | UGCCCGUGAGCAUGACCAAGACCAGCGUGGACUGCACCA | |
| | UGUACAUCUGCGGCGACAGCACCGAGUGCAGCAACCUGC | |
| | UGCUGCAGUACGGCAGCUUCUGCACCCAGCUGAACCGGG | |
| | CCCUGACCGGCAUCGCCGUGGAGCAGGACAAGAACACCCA | |
| | GGAGGUGUUCGCCCAGGUGAAGCAGAUCUACAAGACCCC | |
| | UCCCAUCAAGGACUUCGGCGGCUUCAACUUCAGCCAGAU | |
| | CCUGCCCGACCCCAGCAAGCCCAGCAAGCGGAGCUUCAUC | |
| | GAGGACCUGCUGUUCAACAAGGUGACCCUAGCCGACGCC | |
| | GGCUUCAUCAAGCAGUACGGCGACUGCCUCGGCGACAUA | |
| | GCCGCCCGGGACCUGAUCUGCGCCCAGAAGUUCAACGGCC | |
| | UGACCGUGCUGCCUCCCCUGCUGACCGACGAGAUGAUCGC | |
| | CCAGUACACCAGCGCCCUGUUAGCCGGAACCAUCACCAGC | |
| | GGCUGGACUUUCGGCGCUGGAGCCGCUCUGCAGAUCCCC | |
| | UUCGCCAUGCAGAUGGCCUACCGGUUCAACGGCAUCGGC | |
| | GUGACCCAGAACGUGCUGUACGAGAACCAGAAGCUGAUC | |
| | GCCAACCAGUUCAACAGCGCCAUCGGCAAGAUCCAGGAC | |
| | AGCCUGAGCAGCACCGCUAGCGCCCUGGGCAAGCUGCAG | |
| | GACGUGGUGAACCAGAACGCCCAGGCCCUGAACACCCUG | |
| | GUGAAGCAGCUGAGCAGCAACUUCGGCGCCAUCAGCAGC | |
| | GUGCUGAACGACAUCCUGAGCCGGCUGGACAAGGUGGAG | |
| | GCCGAGGUGCAGAUCGACCGGCUGAUCACUGGCCGGCUG | |
| | CAGAGCCUGCAGACCUACGUGACCCAGCAGCUGAUCCGG | |
| | GCCGCCGAGAUUCGGGCCAGCGCCAACCUGGCCGCCACCA | |
| | AGAUGAGCGAGUGCGUGCUGGGCCAGAGCAAGCGGGUGG | |
| | ACUUCUGCGGCAAGGGCUACCACCUGAUGAGCUUUCCCC | |
| | AGAGCGCACCCCACGGAGUGGUGUUCCUGCACGUGACCU | |
| | ACGUGCCCGCCCAGGAGAAGAACUUCACCACCGCCCCAGC | |
| | CAUCUGCCACGACGGCAAGGCCCACUUUCCCCGGGAGGGC | |
| | GUGUUCGUGAGCAACGGCACCCACUGGUUCGUGACCCAG | |
| | CGGAACUUCUACGAGCCCCAGAUCAUCACCACCGACAACA | |
| | CCUUCGUGAGCGGCAACUGCGACGUGGUGAUCGGCAUCG | |
| | UGAACAACACCGUGUACGAUCCCCUGCAGCCCGAGCUGG | |
| | ACAGCUUCAAGGAGGAGCUGGACAAGUACUUCAAGAAUC | |
| | ACACCAGCCCCGACGUGGACCUGGGCGACAUCAGCGGCAU | |
| | CAACGCCAGCGUGGUGAACAUCCAGAAGGAGAUCGAUCG | |
| | GCUGAACGAGGUGGCCAAGAACCUGAACGAGAGCCUGAU | |
| | CGACCUGCAGGAGCUGGGCAAGUACGAGCAGUACAUCAA | |
| | GUGGCCCUGGUACAUCUGGCUGGGCUUCAUCGCCGGCCU | |
| | GAUCGCCAUCGUGAUGGUGACCAUCAUGCUGAAGAAGAA | |
| | GAAGCGGCCACGGAACUCCUACAAGUGCGGCACCAACACC | |
| | AUGGAGCGGGAGGAGAGCGAGCAGACCAAGAAGCGGGAG | |
| | AAGAUCCACAUUCCUGAACGGUCCGACGAAGCCCAGCGG | |
| | GUGUUCAAGAGCAGCAAGACCAGCAGCUGCGACAAGAGC | |
| | GACACCUGCUUC | |
| 3′UTR | UGAUAAUAGGCUGGAGCCUCGGUGGCCUAGCUUCUUGCC | 4 |
| | CCUUGGGCCUCCCCCCAGCCCCUCCUCCCCUUCCUGCACC | |
| | CGUACCCCCGUGGUCUUUGAAUAAAGUCUGAGUGGGCGG | |
| | C | |
| Corresponding amino | MFVFLVLLPLVSSQCVNLTTRTQLPPAYTNSFTRGVYYPDKVF | 65 |
| acid sequence | RSSVLHSTQDLFLPFFSNVTWFHAIHVSGTNGTKRFDNPVLPF | |
| | NDGVYFASTEKSNIIRGWIFGTTLDSKTQSLLIVNNATNVVIKV | |
| | CEFQFCNDPFLGVYYHKNNKSWMESEFRVYSSANNCTFEYVS | |
| | QPFLMDLEGKQGNFKNLREFVFKNIDGYFKIYSKHTPINLVRD | |
| | LPQGFSALEPLVDLPIGINITRFQTLLALHRSYLTPGDSSSGWT | |
| | AGAAAYYVGYLQPRTFLLKYNENGTITDAVDCALDPLSETKC | |
| | TLKSFTVEKGIYQTSNFRVQPTESIVRFPNITNLCPFGEVFNATR | |
| | FASVYAWNRKRISNCVADYSVLYNSASFSTFKCYGVSPTKLN | |
| | DLCFTNVYADSFVIRGDEVRQIAPGQTGKIADYNYKLPDDFTG | |
| | CVIAWNSNNLDSKVGGNYNYLYRLFRKSNLKPFERDISTEIYQ | |
| | AGSTPCNGVEGFNCYFPLQSYGFQPTNGVGYQPYRVVVLSFE | |
| | LLHAPATVCGPKKSTNLVKNKCVNFNFNGLTGTGVLTESNKK | |
| | FLPFQQFGRDIADTTDAVRDPQTLEILDITPCSFGGVSVITPGTN | |
| | TSNQVAVLYQDVNCTEVPVAIHADQLTPTWRVYSTGSNVFQT | |
| | RAGCLIGAEHVNNSYECDIPIGAGICASYQTQTVSLRSVASQSII | |
| | AYTMSLGAENSVAYSNNSIAIPTNFTISVTTEILPVSMTKTSVD | |
| | CTMYICGDSTECSNLLLQYGSFCTQLNRALTGIAVEQDKNTQE | |
| | VFAQVKQIYKTPPIKDFGGFNFSQILPDPSKPSKRSFIEDLLFNK | |
| | VTLADAGFIKQYGDCLGDIAARDLICAQKFNGLTVLPPLLTDE | |
| | MIAQYTSALLAGTITSGWTFGAGAALQIPFAMQMAYRFNGIG | |
| | VTQNVLYENQKLIANQFNSAIGKIQDSLSSTASALGKLQDVVN | |
| | QNAQALNTLVKQLSSNFGAISSVLNDILSRLDKVEAEVQIDRLI | |
| | TGRLQSLQTYVTQQLIRAAEIRASANLAATKMSECVLGQSKR | |
| | VDFCGKGYHLMSFPQSAPHGVVFLHVTYVPAQEKNFTTAPAI | |
| | CHDGKAHFPREGVFVSNGTHWFVTQRNFYEPQIITTDNTFVSG | |
| | NCDVVIGIVNNTVYDPLQPELDSFKEELDKYFKNHTSPDVDLG | |
| | DISGINASVVNIQKEIDRLNEVAKNLNESLIDLQELGKYEQYIK | |
| | WPWYIWLGFIAGLIAIVMVTIMLKKKKRPRNSYKCGTNTMER | |
| | EESEQTKKREKIHIPERSDEAQRVFKSSKTSSCDKSDTCF | |
| PolyA tail | 100 nt | |

SARS-CoV-2 Variant 27

| SEQ ID NO: 88 consists of from 5′ end to 3′ end: 5′ UTR SEQ ID NO: 2, mRNA ORF SEQ ID | | 88 |
|---|---|---|
| NO: 66, and 3′ UTR SEQ ID NO: 4. | | |
| Chemistry | 1-methylpseudouridine | |
| Cap | 7mG(5′)ppp(5′)NlmpNp | |
| 5′UTR | GGGAAAUAAGAGAGAAAAGAAGAGUAAGAAGAAAUAUA | 2 |
| | AGACCCCGGCGCCGCCACC | |
| ORF of mRNA | AUGUUCGUGUUCCUGGUGCUGCUGCCCCUGGUGAGCAGC | 66 |
| Construct | CAGUGCGUGAACCUGACCACCCGGACCCAGCUGCCACCAG | |
| (excluding the stop | CCUACACCAACAGCUUCACCCGGGGCGUCUACUACCCCGA | |
| codon) | CAAGGUGUUCCGGAGCAGCGUCCUGCACAGCACCCAGGA | |
| | CCUGUUCCUGCCCUUCUUCAGCAACGUGACCUGGUUCCAC | |
| | GCCAUCCACGUGAGCGGCACCAACGGCACCAAGCGGUUCG | |
| | ACAACCCCGUGCUGCCCUUCAACGACGGCGUGUACUUCGC | |
| | CAGCACCGAGAAGAGCAACAUCAUCCGGGGCUGGAUCUU | |
| | CGGCACCACCCUGGACAGCAAGACCCAGAGCCUGCUGAUC | |
| | GUGAAUAACGCCACCAACGUGGUGAUCAAGGUGUGCGAG | |
| | UUCCAGUUCUGCAACGACCCCUUCCUGGGCGUGUACUACC | |
| | ACAAGAACAACAAGAGCUGGAUGGAGAGCGAGUUCCGGG | |
| | UGUACAGCAGCGCCAACAACUGCACCUUCGAGUACGUGA | |
| | GCCAGCCCUUCCUGAUGGACCUGGAGGGCAAGCAGGGCA | |
| | ACUUCAAGAACCUGCGGGAGUUCGUGUUCAAGAACAUCG | |
| | ACGGCUACUUCAAGAUCUACAGCAAGCACACCCCAAUCA | |
| | ACCUGGUGCGGGAUCUGCCCCAGGGCUUCUCAGCCCUGG | |
| | AGCCCCUGGUGGACCUGCCCAUCGGCAUCAACAUCACCCG | |
| | GUUCCAGACCCUGCUGGCCCUGCACCGGAGCUACCUGACC | |
| | CCAGGCGACAGCAGCAGCGGGUGGACAGCAGGCGCGGCU | |
| | GCUUACUACGUGGGCUACCUGCAGCCCCGGACCUUCCUGC | |
| | UGAAGUACAACGAGAACGGCACCAUCACCGACGCCGUGG | |
| | ACUGCGCCCUGGACCCUCUGAGCGAGACCAAGUGCACCCU | |
| | GAAGAGCUUCACCGUGGAGAAGGGCAUCUACCAGACCAG | |
| | CAACUUCCGGGUGCAGCCCACCGAGAGCAUCGUGCGGUU | |
| | CCCCAACAUCACCAACCUGUGCCCCUUCGGCGAGGUGUUC | |
| | AACGCCACCCGGUUCGCCAGCGUGUACGCCUGGAACCGGA | |
| | AGCGGAUCAGCAACUGCGUGGCCGACUACAGCGUGCUGU | |
| | ACAACAGCGCCAGCUUCAGCACCUUCAAGUGCUACGGCG | |
| | UGAGCCCCACCAAGCUGAACGACCUGUGCUUCACCAACGU | |
| | GUACGCCGACAGCUUCGUGAUCCGUGGCGACGAGGUGCG | |
| | GCAGAUCGCACCCGGCCAGACAGGCAAGAUCGCCGACUAC | |
| | AACUACAAGCUGCCCGACGACUUCACCGGCUGCGUGAUC | |
| | GCCUGGAACAGCAACAACCUCGACAGCAAGGUGGGCGGC | |
| | AACUACAACUACCUGUACCGGCUGUUCCGGAAGAGCAAC | |
| | CUGAAGCCCUUCGAGCGGGACAUCAGCACCGAGAUCUAC | |
| | CAAGCCGGCUCCACCCCUUGCAACGGCGUGGAGGGCUUCA | |
| | ACUGCUACUUCCCUCUGCAGAGCUACGGCUUCCAGCCCAC | |
| | CAACGGCGUGGGCUACCAGCCCUACCGGGUGGUGGUGCU | |
| | GAGCUUCGAGCUGCUGCACGCCCCAGCCACCGUGUGUGGC | |
| | CCCAAGAAGAGCACCAACCUGGUGAAGAACAAGUGCGUG | |
| | AACUUCAACUUCAACGGCCUUACCGGCACCGGCGUGCUG | |
| | ACCGAGAGCAACAAGAAAUUCCUGCCCUUUCAGCAGUUC | |
| | GGCCGGGACAUCGCCGACACCACCGACGCUGUGCGGGAUC | |
| | CCCAGACCCUGGAGAUCCUGGACAUCACCCCUUGCAGCUU | |
| | CGGCGGCGUGAGCGUGAUCACCCCAGGCACCAACACCAGC | |
| | AACCAGGUGGCCGUGCUGUACCAGGACGUGAACUGCACC | |
| | GAGGUGCCCGUGGCCAUCCACGCCGACCAGCUGACACCCA | |
| | CCUGGCGGGUCUACAGCACCGGCAGCAACGUGUUCCAGA | |
| | CCCGGGCCGGUUGCCUGAUCGGCGCCGAGCACGUGAACA | |
| | ACAGCUACGAGUGCGACAUCCCCAUCGGCGCCGGCAUCUG | |
| | UGCCAGCUACCAGACCCAGACCGUGUCACUGAGGAGCGU | |
| | GGCCAGCCAGAGCAUCAUCGCCUACACCAUGAGCCUGGGC | |
| | GCCGAGAACAGCGUGGCCUACAGCAACAACAGCAUCGCC | |
| | AUCCCCACCAACUUCACCAUCAGCGUGACCACCGAGAUUC | |
| | UGCCCGUGAGCAUGACCAAGACCAGCGUGGACUGCACCA | |
| | UGUACAUCUGCGGCGACAGCACCGAGUGCAGCAACCUGC | |
| | UGCUGCAGUACGGCAGCUUCUGCACCCAGCUGAACCGGG | |
| | CCCUGACCGGCAUCGCCGUGGAGCAGGACAAGAACACCCA | |
| | GGAGGUGUUCGCCCAGGUGAAGCAGAUCUACAAGACCCC | |
| | UCCCAUCAAGGACUUCGGCGGCUUCAACUUCAGCCAGAU | |
| | CCUGCCCGACCCCAGCAAGCCCAGCAAGCGGAGCUUCAUC | |
| | GAGGACCUGCUGUUCAACAAGGUGACCCUAGCCGACGCC | |
| | GGCUUCAUCAAGCAGUACGGCGACUGCCUCGGCGACAUA | |
| | GCCGCCCGGGACCUGAUCUGCGCCCAGAAGUUCAACGGCC | |
| | UGACCGUGCUGCCUCCCCUGCUGACCGACGAGAUGAUCGC | |
| | CCAGUACACCAGCGCCCUGUUAGCCGGAACCAUCACCAGC | |
| | GGCUGGACUUUCGGCGCUGGAGCCGCUCUGCAGAUCCCC | |
| | UUCGCCAUGCAGAUGGCCUACCGGUUCAACGGCAUCGGC | |
| | GUGACCCAGAACGUGCUGUACGAGAACCAGAAGCUGAUC | |
| | GCCAACCAGUUCAACAGCGCCAUCGGCAAGAUCCAGGAC | |
| | AGCCUGAGCAGCACCGCUAGCGCCCUGGGCAAGCUGCAG | |
| | GACGUGGUGAACCAGAACGCCCAGGCCCUGAACACCCUG | |
| | GUGAAGCAGCUGAGCAGCAACUUCGGCGCCAUCAGCAGC | |
| | GUGCUGAACGACAUCCUGAGCCGGCUGGACAAGGUGGAG | |
| | GCCGAGGUGCAGAUCGACCGGCUGAUCACUGGCCGGCUG | |
| | CAGAGCCUGCAGACCUACGUGACCCAGCAGCUGAUCCGG | |
| | GCCGCCGAGAUUCGGGCCAGCGCCAACCUGGCCGCCACCA | |
| | AGAUGAGCGAGUGCGUGCUGGGCCAGAGCAAGCGGGUGG | |
| | ACUUCUGCGGCAAGGGCUACCACCUGAUGAGCUUUCCCC | |
| | AGAGCGCACCCCACGGAGUGGUGUUCCUGCACGUGACCU | |
| | ACGUGCCCGCCCAGGAGAAGAACUUCACCACCGCCCCAGC | |
| | CAUCUGCCACGACGGCAAGGCCCACUUUCCCCGGGAGGGC | |
| | GUGUUCGUGAGCAACGGCACCCACUGGUUCGUGACCCAG | |
| | CGGAACUUCUACGAGCCCCAGAUCAUCACCACCGACAACA | |
| | CCUUCGUGAGCGGCAACUGCGACGUGGUGAUCGGCAUCG | |
| | UGAACAACACCGUGUACGAUCCCCUGCAGCCCGAGCUGG | |
| | ACAGCUUCAAGGAGGAGCUGGACAAGUACUUCAAGAAUC | |
| | ACACCAGCCCCGACGUGGACCUGGGCGACAUCAGCGGCAU | |
| | CAACGCCAGCGUGGUGAACAUCCAGAAGGAGAUCGAUCG | |
| | GCUGAACGAGGUGGCCAAGAACCUGAACGAGAGCCUGAU | |
| | CGACCUGCAGGAGCUGGGCAAGUACGAGCAGUACAUCAA | |
| | GUGGCCCUGGUACAUCUGGCUGGGCUUCAUCGCCGGCCU | |
| | GAUCGCCAUCGUGAUGGUGACCAUCAUGCUGAAGCGGCA | |
| | GUACAAGGACAUGAUGAGCGAGGGAGGACCACCUGGCGC | |
| | UGAGCCACAG | |
| 3′UTR | UGAUAAUAGGCUGGAGCCUCGGUGGCCUAGCUUCUUGCC | 4 |
| | CCUUGGGCCUCCCCCCAGCCCCUCCUCCCCUUCCUGCACC | |
| | CGUACCCCCGUGGUCUUUGAAUAAAGUCUGAGUGGGCGG | |
| | C | |
| Corresponding amino | MFVFLVLLPLVSSQCVNLTTRTQLPPAYTNSFTRGVYYPDKVF | 67 |
| acid sequence | RSSVLHSTQDLFLPFFSNVTWFHAIHVSGTNGTKRFDNPVLPF | |
| | NDGVYFASTEKSNIIRGWIFGTTLDSKTQSLLIVNNATNVVIKV | |
| | CEFQFCNDPFLGVYYHKNNKSWMESEFRVYSSANNCTFEYVS | |
| | QPFLMDLEGKQGNFKNLREFVFKNIDGYFKIYSKHTPINLVRD | |
| | LPQGFSALEPLVDLPIGINITRFQTLLALHRSYLTPGDSSSGWT | |
| | AGAAAYYVGYLQPRTFLLKYNENGTITDAVDCALDPLSETKC | |
| | TLKSFTVEKGIYQTSNFRVQPTESIVRFPNITNLCPFGEVFNATR | |
| | FASVYAWNRKRISNCVADYSVLYNSASFSTFKCYGVSPTKLN | |
| | DLCFTNVYADSFVIRGDEVRQIAPGQTGKIADYNYKLPDDFTG | |
| | CVIAWNSNNLDSKVGGNYNYLYRLFRKSNLKPFERDISTEIYQ | |
| | AGSTPCNGVEGFNCYFPLQSYGFQPTNGVGYQPYRVVVLSFE | |
| | LLHAPATVCGPKKSTNLVKNKCVNFNFNGLTGTGVLTESNKK | |
| | FLPFQQFGRDIADTTDAVRDPQTLEILDITPCSFGGVSVITPGTN | |
| | TSNQVAVLYQDVNCTEVPVAIHADQLTPTWRVYSTGSNVFQT | |
| | RAGCLIGAEHVNNSYECDIPIGAGICASYQTQTVSLRSVASQSII | |
| | AYTMSLGAENSVAYSNNSIAIPTNFTISVTTEILPVSMTKTSVD | |
| | CTMYICGDSTECSNLLLQYGSFCTQLNRALTGIAVEQDKNTQE | |
| | VFAQVKQIYKTPPIKDFGGFNFSQILPDPSKPSKRSFIEDLLFNK | |
| | VTLADAGFIKQYGDCLGDIAARDLICAQKFNGLTVLPPLLTDE | |
| | MIAQYTSALLAGTITSGWTFGAGAALQIPFAMQMAYRFNGIG | |
| | VTQNVLYENQKLIANQFNSAIGKIQDSLSSTASALGKLQDVVN | |
| | QNAQALNTLVKQLSSNFGAISSVLNDILSRLDKVEAEVQIDRLI | |
| | TGRLQSLQTYVTQQLIRAAEIRASANLAATKMSECVLGQSKR | |
| | VDFCGKGYHLMSFPQSAPHGVVFLHVTYVPAQEKNFTTAPAI | |
| | CHDGKAHFPREGVFVSNGTHWFVTQRNFYEPQIITTDNTFVSG | |
| | NCDVVIGIVNNTVYDPLQPELDSFKEELDKYFKNHTSPDVDLG | |
| | DISGINASVVNIQKEIDRLNEVAKNLNESLIDLQELGKYEQYIK | |
| | WPWYIWLGFIAGLIAIVMVTIMLKRQYKDMMSEGGPPGAEPQ | |
| PolyA tail | 100 nt | |

SARS-CoV-2 Variant 28

| SEQ ID NO: 89 consists of from 5′ end to 3′ end: 5′ UTR SEQ ID NO: 2, mRNA ORF SEQ ID | | 89 |
|---|---|---|
| NO: 68, and 3′ UTR SEQ ID NO: 4. | | |
| Chemistry | 1-methylpseudouridine | |
| Cap | 7mG(5′)ppp(5′)NlmpNp | |
| 5′UTR | GGGAAAUAAGAGAGAAAAGAAGAGUAAGAAGAAAUAUA | 2 |
| | AGACCCCGGCGCCGCCACC | |
| ORF of mRNA | AUGUUCGUGUUCCUGGUGCUGCUGCCCCUGGUGAGCAGC | 68 |
| Construct | CAGUGCGUGAACCUGACCACCCGGACCCAGCUGCCACCAG | |
| (excluding the stop | CCUACACCAACAGCUUCACCCGGGGCGUCUACUACCCCGA | |
| codon) | CAAGGUGUUCCGGAGCAGCGUCCUGCACAGCACCCAGGA | |
| | CCUGUUCCUGCCCUUCUUCAGCAACGUGACCUGGUUCCAC | |
| | GCCAUCCACGUGAGCGGCACCAACGGCACCAAGCGGUUCG | |
| | ACAACCCCGUGCUGCCCUUCAACGACGGCGUGUACUUCGC | |
| | CAGCACCGAGAAGAGCAACAUCAUCCGGGGCUGGAUCUU | |
| | CGGCACCACCCUGGACAGCAAGACCCAGAGCCUGCUGAUC | |
| | GUGAAUAACGCCACCAACGUGGUGAUCAAGGUGUGCGAG | |
| | UUCCAGUUCUGCAACGACCCCUUCCUGGGCGUGUACUACC | |
| | ACAAGAACAACAAGAGCUGGAUGGAGAGCGAGUUCCGGG | |
| | UGUACAGCAGCGCCAACAACUGCACCUUCGAGUACGUGA | |
| | GCCAGCCCUUCCUGAUGGACCUGGAGGGCAAGCAGGGCA | |
| | ACUUCAAGAACCUGCGGGAGUUCGUGUUCAAGAACAUCG | |
| | ACGGCUACUUCAAGAUCUACAGCAAGCACACCCCAAUCA | |
| | ACCUGGUGCGGGAUCUGCCCCAGGGCUUCUCAGCCCUGG | |
| | AGCCCCUGGUGGACCUGCCCAUCGGCAUCAACAUCACCCG | |
| | GUUCCAGACCCUGCUGGCCCUGCACCGGAGCUACCUGACC | |
| | CCAGGCGACAGCAGCAGCGGGUGGACAGCAGGCGCGGCU | |
| | GCUUACUACGUGGGCUACCUGCAGCCCCGGACCUUCCUGC | |
| | UGAAGUACAACGAGAACGGCACCAUCACCGACGCCGUGG | |
| | ACUGCGCCCUGGACCCUCUGAGCGAGACCAAGUGCACCCU | |
| | GAAGAGCUUCACCGUGGAGAAGGGCAUCUACCAGACCAG | |
| | CAACUUCCGGGUGCAGCCCACCGAGAGCAUCGUGCGGUU | |
| | CCCCAACAUCACCAACCUGUGCCCCUUCGGCGAGGUGUUC | |
| | AACGCCACCCGGUUCGCCAGCGUGUACGCCUGGAACCGGA | |
| | AGCGGAUCAGCAACUGCGUGGCCGACUACAGCGUGCUGU | |
| | ACAACAGCGCCAGCUUCAGCACCUUCAAGUGCUACGGCG | |
| | UGAGCCCCACCAAGCUGAACGACCUGUGCUUCACCAACGU | |
| | GUACGCCGACAGCUUCGUGAUCCGUGGCGACGAGGUGCG | |
| | GCAGAUCGCACCCGGCCAGACAGGCAAGAUCGCCGACUAC | |
| | AACUACAAGCUGCCCGACGACUUCACCGGCUGCGUGAUC | |
| | GCCUGGAACAGCAACAACCUCGACAGCAAGGUGGGCGGC | |
| | AACUACAACUACCUGUACCGGCUGUUCCGGAAGAGCAAC | |
| | CUGAAGCCCUUCGAGCGGGACAUCAGCACCGAGAUCUAC | |
| | CAAGCCGGCUCCACCCCUUGCAACGGCGUGGAGGGCUUCA | |
| | ACUGCUACUUCCCUCUGCAGAGCUACGGCUUCCAGCCCAC | |
| | CAACGGCGUGGGCUACCAGCCCUACCGGGUGGUGGUGCU | |
| | GAGCUUCGAGCUGCUGCACGCCCCAGCCACCGUGUGUGGC | |
| | CCCAAGAAGAGCACCAACCUGGUGAAGAACAAGUGCGUG | |
| | AACUUCAACUUCAACGGCCUUACCGGCACCGGCGUGCUG | |
| | ACCGAGAGCAACAAGAAAUUCCUGCCCUUUCAGCAGUUC | |
| | GGCCGGGACAUCGCCGACACCACCGACGCUGUGCGGGAUC | |
| | CCCAGACCCUGGAGAUCCUGGACAUCACCCCUUGCAGCUU | |
| | CGGCGGCGUGAGCGUGAUCACCCCAGGCACCAACACCAGC | |
| | AACCAGGUGGCCGUGCUGUACCAGGACGUGAACUGCACC | |
| | GAGGUGCCCGUGGCCAUCCACGCCGACCAGCUGACACCCA | |
| | CCUGGCGGGUCUACAGCACCGGCAGCAACGUGUUCCAGA | |
| | CCCGGGCCGGUUGCCUGAUCGGCGCCGAGCACGUGAACA | |
| | ACAGCUACGAGUGCGACAUCCCCAUCGGCGCCGGCAUCUG | |
| | UGCCAGCUACCAGACCCAGACCGUGUCACUGAGGAGCGU | |
| | GGCCAGCCAGAGCAUCAUCGCCUACACCAUGAGCCUGGGC | |
| | GCCGAGAACAGCGUGGCCUACAGCAACAACAGCAUCGCC | |
| | AUCCCCACCAACUUCACCAUCAGCGUGACCACCGAGAUUC | |
| | UGCCCGUGAGCAUGACCAAGACCAGCGUGGACUGCACCA | |
| | UGUACAUCUGCGGCGACAGCACCGAGUGCAGCAACCUGC | |
| | UGCUGCAGUACGGCAGCUUCUGCACCCAGCUGAACCGGG | |
| | CCCUGACCGGCAUCGCCGUGGAGCAGGACAAGAACACCCA | |
| | GGAGGUGUUCGCCCAGGUGAAGCAGAUCUACAAGACCCC | |
| | UCCCAUCAAGGACUUCGGCGGCUUCAACUUCAGCCAGAU | |
| | CCUGCCCGACCCCAGCAAGCCCAGCAAGCGGAGCUUCAUC | |
| | GAGGACCUGCUGUUCAACAAGGUGACCCUAGCCGACGCC | |
| | GGCUUCAUCAAGCAGUACGGCGACUGCCUCGGCGACAUA | |
| | GCCGCCCGGGACCUGAUCUGCGCCCAGAAGUUCAACGGCC | |
| | UGACCGUGCUGCCUCCCCUGCUGACCGACGAGAUGAUCGC | |
| | CCAGUACACCAGCGCCCUGUUAGCCGGAACCAUCACCAGC | |
| | GGCUGGACUUUCGGCGCUGGAGCCGCUCUGCAGAUCCCC | |
| | UUCGCCAUGCAGAUGGCCUACCGGUUCAACGGCAUCGGC | |
| | GUGACCCAGAACGUGCUGUACGAGAACCAGAAGCUGAUC | |
| | GCCAACCAGUUCAACAGCGCCAUCGGCAAGAUCCAGGAC | |
| | AGCCUGAGCAGCACCGCUAGCGCCCUGGGCAAGCUGCAG | |
| | GACGUGGUGAACCAGAACGCCCAGGCCCUGAACACCCUG | |
| | GUGAAGCAGCUGAGCAGCAACUUCGGCGCCAUCAGCAGC | |
| | GUGCUGAACGACAUCCUGAGCCGGCUGGACCCCCCCGAGG | |
| | CCGAGGUGCAGAUCGACCGGCUGAUCACUGGCCGGCUGC | |
| | AGAGCCUGCAGACCUACGUGACCCAGCAGCUGAUCCGGG | |
| | CCGCCGAGAUUCGGGCCAGCGCCAACCUGGCCGCCACCAA | |
| | GAUGAGCGAGUGCGUGCUGGGCCAGAGCAAGCGGGUGGA | |
| | CUUCUGCGGCAAGGGCUACCACCUGAUGAGCUUUCCCCA | |
| | GAGCGCACCCCACGGAGUGGUGUUCCUGCACGUGACCUA | |
| | CGUGCCCGCCCAGGAGAAGAACUUCACCACCGCCCCAGCC | |
| | AUCUGCCACGACGGCAAGGCCCACUUUCCCCGGGAGGGCG | |
| | UGUUCGUGAGCAACGGCACCCACUGGUUCGUGACCCAGC | |
| | GGAACUUCUACGAGCCCCAGAUCAUCACCACCGACAACAC | |
| | CUUCGUGAGCGGCAACUGCGACGUGGUGAUCGGCAUCGU | |
| | GAACAACACCGUGUACGAUCCCCUGCAGCCCGAGCUGGAC | |
| | AGCUUCAAGGAGGAGCUGGACAAGUACUUCAAGAAUCAC | |
| | ACCAGCCCCGACGUGGACCUGGGCGACAUCAGCGGCAUCA | |
| | ACGCCAGCGUGGUGAACAUCCAGAAGGAGAUCGAUCGGC | |
| | UGAACGAGGUGGCCAAGAACCUGAACGAGAGCCUGAUCG | |
| | ACCUGCAGGAGCUGGGCAAGUACGAGCAGUACAUCAAGU | |
| | GGCCCUGGUACAUCUGGCUGGGCUUCAUCGCCGGCCUGA | |
| | UCGCCAUCGUGAUGGUGACCAUCAUGCUG | |
| 3′UTR | UGAUAAUAGGCUGGAGCCUCGGUGGCCUAGCUUCUUGCC | 4 |
| | CCUUGGGCCUCCCCCCAGCCCCUCCUCCCCUUCCUGCACC | |
| | CGUACCCCCGUGGUCUUUGAAUAAAGUCUGAGUGGGCGG | |
| | C | |
| Corresponding amino | MFVFLVLLPLVSSQCVNLTTRTQLPPAYTNSFTRGVYYPDKVF | 69 |
| acid sequence | RSSVLHSTQDLFLPFFSNVTWFHAIHVSGTNGTKRFDNPVLPF | |
| | NDGVYFASTEKSNIIRGWIFGTTLDSKTQSLLIVNNATNVVIKV | |
| | CEFQFCNDPFLGVYYHKNNKSWMESEFRVYSSANNCTFEYVS | |
| | QPFLMDLEGKQGNFKNLREFVFKNIDGYFKIYSKHTPINLVRD | |
| | LPQGFSALEPLVDLPIGINITRFQTLLALHRSYLTPGDSSSGWT | |
| | AGAAAYYVGYLQPRTFLLKYNENGTITDAVDCALDPLSETKC | |
| | TLKSFTVEKGIYQTSNFRVQPTESIVRFPNITNLCPFGEVFNATR | |
| | FASVYAWNRKRISNCVADYSVLYNSASFSTFKCYGVSPTKLN | |
| | DLCFTNVYADSFVIRGDEVRQIAPGQTGKIADYNYKLPDDFTG | |
| | CVIAWNSNNLDSKVGGNYNYLYRLFRKSNLKPFERDISTEIYQ | |
| | AGSTPCNGVEGFNCYFPLQSYGFQPTNGVGYQPYRVVVLSFE | |
| | LLHAPATVCGPKKSTNLVKNKCVNFNFNGLTGTGVLTESNKK | |
| | FLPFQQFGRDIADTTDAVRDPQTLEILDITPCSFGGVSVITPGTN | |
| | TSNQVAVLYQDVNCTEVPVAIHADQLTPTWRVYSTGSNVFQT | |
| | RAGCLIGAEHVNNSYECDIPIGAGICASYQTQTVSLRSVASQSII | |
| | AYTMSLGAENSVAYSNNSIAIPTNFTISVTTEILPVSMTKTSVD | |
| | CTMYICGDSTECSNLLLQYGSFCTQLNRALTGIAVEQDKNTQE | |
| | VFAQVKQIYKTPPIKDFGGFNFSQILPDPSKPSKRSFIEDLLFNK | |
| | VTLADAGFIKQYGDCLGDIAARDLICAQKFNGLTVLPPLLTDE | |
| | MIAQYTSALLAGTITSGWTFGAGAALQIPFAMQMAYRFNGIG | |
| | VTQNVLYENQKLIANQFNSAIGKIQDSLSSTASALGKLQDVVN | |
| | QNAQALNTLVKQLSSNFGAISSVLNDILSRLDPPEAEVQIDRLI | |
| | TGRLQSLQTYVTQQLIRAAEIRASANLAATKMSECVLGQSKR | |
| | VDFCGKGYHLMSFPQSAPHGVVFLHVTYVPAQEKNFTTAPAI | |
| | CHDGKAHFPREGVFVSNGTHWFVTQRNFYEPQIITTDNTFVSG | |
| | NCDVVIGIVNNTVYDPLQPELDSFKEELDKYFKNHTSPDVDLG | |
| | DISGINASVVNIQKEIDRLNEVAKNLNESLIDLQELGKYEQYIK | |
| | WPWYIWLGFIAGLIAIVMVTIML | |
| PolyA tail | 100 nt | |

SARS-CoV-2 Variant 29

| SEQ ID NO: 90 consists of from 5′ end to 3′ end: 5′ UTR SEQ ID NO: 2, mRNA ORF SEQ ID | | 90 |
|---|---|---|
| NO: 70, and 3′ UTR SEQ ID NO: 4. | | |
| Chemistry | 1-methylpseudouridine | |
| Cap | 7mG(5′)ppp(5′)NlmpNp | |
| 5′UTR | GGGAAAUAAGAGAGAAAAGAAGAGUAAGAAGAAAUAUA | 2 |
| | AGACCCCGGCGCCGCCACC | |
| ORF ofmRNA | AUGUUCGUGUUCCUGGUGCUGCUGCCCCUGGUGAGCAGC | 70 |
| Construct | CAGUGCGUGAACCUGACCACCCGGACCCAGCUGCCACCAG | |
| (excluding the stop | CCUACACCAACAGCUUCACCCGGGGCGUCUACUACCCCGA | |
| codon) | CAAGGUGUUCCGGAGCAGCGUCCUGCACAGCACCCAGGA | |
| | CCUGUUCCUGCCCUUCUUCAGCAACGUGACCUGGUUCCAC | |
| | GCCAUCCACGUGAGCGGCACCAACGGCACCAAGCGGUUCG | |
| | ACAACCCCGUGCUGCCCUUCAACGACGGCGUGUACUUCGC | |
| | CAGCACCGAGAAGAGCAACAUCAUCCGGGGCUGGAUCUU | |
| | CGGCACCACCCUGGACAGCAAGACCCAGAGCCUGCUGAUC | |
| | GUGAAUAACGCCACCAACGUGGUGAUCAAGGUGUGCGAG | |
| | UUCCAGUUCUGCAACGACCCCUUCCUGGGCGUGUACUACC | |
| | ACAAGAACAACAAGAGCUGGAUGGAGAGCGAGUUCCGGG | |
| | UGUACAGCAGCGCCAACAACUGCACCUUCGAGUACGUGA | |
| | GCCAGCCCUUCCUGAUGGACCUGGAGGGCAAGCAGGGCA | |
| | ACUUCAAGAACCUGCGGGAGUUCGUGUUCAAGAACAUCG | |
| | ACGGCUACUUCAAGAUCUACAGCAAGCACACCCCAAUCA | |
| | ACCUGGUGCGGGAUCUGCCCCAGGGCUUCUCAGCCCUGG | |
| | AGCCCCUGGUGGACCUGCCCAUCGGCAUCAACAUCACCCG | |
| | GUUCCAGACCCUGCUGGCCCUGCACCGGAGCUACCUGACC | |
| | CCAGGCGACAGCAGCAGCGGGUGGACAGCAGGCGCGGCU | |
| | GCUUACUACGUGGGCUACCUGCAGCCCCGGACCUUCCUGC | |
| | UGAAGUACAACGAGAACGGCACCAUCACCGACGCCGUGG | |
| | ACUGCGCCCUGGACCCUCUGAGCGAGACCAAGUGCACCCU | |
| | GAAGAGCUUCACCGUGGAGAAGGGCAUCUACCAGACCAG | |
| | CAACUUCCGGGUGCAGCCCACCGAGAGCAUCGUGCGGUU | |
| | CCCCAACAUCACCAACCUGUGCCCCUUCGGCGAGGUGUUC | |
| | AACGCCACCCGGUUCGCCAGCGUGUACGCCUGGAACCGGA | |
| | AGCGGAUCAGCAACUGCGUGGCCGACUACAGCGUGCUGU | |
| | ACAACAGCGCCAGCUUCAGCACCUUCAAGUGCUACGGCG | |
| | UGAGCCCCACCAAGCUGAACGACCUGUGCUUCACCAACGU | |
| | GUACGCCGACAGCUUCGUGAUCCGUGGCGACGAGGUGCG | |
| | GCAGAUCGCACCCGGCCAGACAGGCAAGAUCGCCGACUAC | |
| | AACUACAAGCUGCCCGACGACUUCACCGGCUGCGUGAUC | |
| | GCCUGGAACAGCAACAACCUCGACAGCAAGGUGGGCGGC | |
| | AACUACAACUACCUGUACCGGCUGUUCCGGAAGAGCAAC | |
| | CUGAAGCCCUUCGAGCGGGACAUCAGCACCGAGAUCUAC | |
| | CAAGCCGGCUCCACCCCUUGCAACGGCGUGGAGGGCUUCA | |
| | ACUGCUACUUCCCUCUGCAGAGCUACGGCUUCCAGCCCAC | |
| | CAACGGCGUGGGCUACCAGCCCUACCGGGUGGUGGUGCU | |
| | GAGCUUCGAGCUGCUGCACGCCCCAGCCACCGUGUGUGGC | |
| | CCCAAGAAGAGCACCAACCUGGUGAAGAACAAGUGCGUG | |
| | AACUUCAACUUCAACGGCCUUACCGGCACCGGCGUGCUG | |
| | ACCGAGAGCAACAAGAAAUUCCUGCCCUUUCAGCAGUUC | |
| | GGCCGGGACAUCGCCGACACCACCGACGCUGUGCGGGAUC | |
| | CCCAGACCCUGGAGAUCCUGGACAUCACCCCUUGCAGCUU | |
| | CGGCGGCGUGAGCGUGAUCACCCCAGGCACCAACACCAGC | |
| | AACCAGGUGGCCGUGCUGUACCAGGACGUGAACUGCACC | |
| | GAGGUGCCCGUGGCCAUCCACGCCGACCAGCUGACACCCA | |
| | CCUGGCGGGUCUACAGCACCGGCAGCAACGUGUUCCAGA | |
| | CCCGGGCCGGUUGCCUGAUCGGCGCCGAGCACGUGAACA | |
| | ACAGCUACGAGUGCGACAUCCCCAUCGGCGCCGGCAUCUG | |
| | UGCCAGCUACCAGACCCAGACCGUGUCACUGAGGAGCGU | |
| | GGCCAGCCAGAGCAUCAUCGCCUACACCAUGAGCCUGGGC | |
| | GCCGAGAACAGCGUGGCCUACAGCAACAACAGCAUCGCC | |
| | AUCCCCACCAACUUCACCAUCAGCGUGACCACCGAGAUUC | |
| | UGCCCGUGAGCAUGACCAAGACCAGCGUGGACUGCACCA | |
| | UGUACAUCUGCGGCGACAGCACCGAGUGCAGCAACCUGC | |
| | UGCUGCAGUACGGCAGCUUCUGCACCCAGCUGAACCGGG | |
| | CCCUGACCGGCAUCGCCGUGGAGCAGGACAAGAACACCCA | |
| | GGAGGUGUUCGCCCAGGUGAAGCAGAUCUACAAGACCCC | |
| | UCCCAUCAAGGACUUCGGCGGCUUCAACUUCAGCCAGAU | |
| | CCUGCCCGACCCCAGCAAGCCCAGCAAGCGGAGCUUCAUC | |
| | GAGGACCUGCUGUUCAACAAGGUGACCCUAGCCGACGCC | |
| | GGCUUCAUCAAGCAGUACGGCGACUGCCUCGGCGACAUA | |
| | GCCGCCCGGGACCUGAUCUGCGCCCAGAAGUUCAACGGCC | |
| | UGACCGUGCUGCCUCCCCUGCUGACCGACGAGAUGAUCGC | |
| | CCAGUACACCAGCGCCCUGUUAGCCGGAACCAUCACCAGC | |
| | GGCUGGACUUUCGGCGCUGGAGCCGCUCUGCAGAUCCCC | |
| | UUCGCCAUGCAGAUGGCCUACCGGUUCAACGGCAUCGGC | |
| | GUGACCCAGAACGUGCUGUACGAGAACCAGAAGCUGAUC | |
| | GCCAACCAGUUCAACAGCGCCAUCGGCAAGAUCCAGGAC | |
| | AGCCUGAGCAGCACCGCUAGCGCCCUGGGCAAGCUGCAG | |
| | GACGUGGUGAACCAGAACGCCCAGGCCCUGAACACCCUG | |
| | GUGAAGCAGCUGAGCAGCAACUUCGGCGCCAUCAGCAGC | |
| | GUGCUGAACGACAUCCUGAGCCGGCUGGACCCCCCCGAGG | |
| | CCGAGGUGCAGAUCGACCGGCUGAUCACUGGCCGGCUGC | |
| | AGAGCCUGCAGACCUACGUGACCCAGCAGCUGAUCCGGG | |
| | CCGCCGAGAUUCGGGCCAGCGCCAACCUGGCCGCCACCAA | |
| | GAUGAGCGAGUGCGUGCUGGGCCAGAGCAAGCGGGUGGA | |
| | CUUCUGCGGCAAGGGCUACCACCUGAUGAGCUUUCCCCA | |
| | GAGCGCACCCCACGGAGUGGUGUUCCUGCACGUGACCUA | |
| | CGUGCCCGCCCAGGAGAAGAACUUCACCACCGCCCCAGCC | |
| | AUCUGCCACGACGGCAAGGCCCACUUUCCCCGGGAGGGCG | |
| | UGUUCGUGAGCAACGGCACCCACUGGUUCGUGACCCAGC | |
| | GGAACUUCUACGAGCCCCAGAUCAUCACCACCGACAACAC | |
| | CUUCGUGAGCGGCAACUGCGACGUGGUGAUCGGCAUCGU | |
| | GAACAACACCGUGUACGAUCCCCUGCAGCCCGAGCUGGAC | |
| | AGCUUCAAGGAGGAGCUGGACAAGUACUUCAAGAAUCAC | |
| | ACCAGCCCCGACGUGGACCUGGGCGACAUCAGCGGCAUCA | |
| | ACGCCAGCGUGGUGAACAUCCAGAAGGAGAUCGAUCGGC | |
| | UGAACGAGGUGGCCAAGAACCUGAACGAGAGCCUGAUCG | |
| | ACCUGCAGGAGCUGGGCAAGUACGAGCAGUACAUCAAGU | |
| | GGCCCUGGUACAUCUGGCUGGGCUUCAUCGCCGGCCUGA | |
| | UCGCCAUCGUGAUGGUGACCAUCAUGCUGAAGAAGAAGA | |
| | AGCGGCCACGGAACUCCUACAAGUGCGGCACCAACACCAU | |
| | GGAGCGGGAGGAGAGCGAGCAGACCAAGAAGCGGGAGAA | |
| | GAUCCACAUUCCUGAACGGUCCGACGAAGCCCAGCGGGU | |
| | GUUCAAGAGCAGCAAGACCAGCAGCUGCGACAAGAGCGA | |
| | CACCUGCUUC | |
| 3′UTR | UGAUAAUAGGCUGGAGCCUCGGUGGCCUAGCUUCUUGCC | 4 |
| | CCUUGGGCCUCCCCCCAGCCCCUCCUCCCCUUCCUGCACC | |
| | CGUACCCCCGUGGUCUUUGAAUAAAGUCUGAGUGGGCGG | |
| | C | |
| Corresponding amino | MFVFLVLLPLVSSQCVNLTTRTQLPPAYTNSFTRGVYYPDKVF | 71 |
| acid sequence | RSSVLHSTQDLFLPFFSNVTWFHAIHVSGTNGTKRFDNPVLPF | |
| | NDGVYFASTEKSNIIRGWIFGTTLDSKTQSLLIVNNATNVVIKV | |
| | CEFQFCNDPFLGVYYHKNNKSWMESEFRVYSSANNCTFEYVS | |
| | QPFLMDLEGKQGNFKNLREFVFKNIDGYFKIYSKHTPINLVRD | |
| | LPQGFSALEPLVDLPIGINITRFQTLLALHRSYLTPGDSSSGWT | |
| | AGAAAYYVGYLQPRTFLLKYNENGTITDAVDCALDPLSETKC | |
| | TLKSFTVEKGIYQTSNFRVQPTESIVRFPNITNLCPFGEVFNATR | |
| | FASVYAWNRKRISNCVADYSVLYNSASFSTFKCYGVSPTKLN | |
| | DLCFTNVYADSFVIRGDEVRQIAPGQTGKIADYNYKLPDDFTG | |
| | CVIAWNSNNLDSKVGGNYNYLYRLFRKSNLKPFERDISTEIYQ | |
| | AGSTPCNGVEGFNCYFPLQSYGFQPTNGVGYQPYRVVVLSFE | |
| | LLHAPATVCGPKKSTNLVKNKCVNFNFNGLTGTGVLTESNKK | |
| | FLPFQQFGRDIADTTDAVRDPQTLEILDITPCSFGGVSVITPGTN | |
| | TSNQVAVLYQDVNCTEVPVAIHADQLTPTWRVYSTGSNVFQT | |
| | RAGCLIGAEHVNNSYECDIPIGAGICASYQTQTVSLRSVASQSII | |
| | AYTMSLGAENSVAYSNNSIAIPTNFTISVTTEILPVSMTKTSVD | |
| | CTMYICGDSTECSNLLLQYGSFCTQLNRALTGIAVEQDKNTQE | |
| | VFAQVKQIYKTPPIKDFGGFNFSQILPDPSKPSKRSFIEDLLFNK | |
| | VTLADAGFIKQYGDCLGDIAARDLICAQKFNGLTVLPPLLTDE | |
| | MIAQYTSALLAGTITSGWTFGAGAALQIPFAMQMAYRFNGIG | |
| | VTQNVLYENQKLIANQFNSAIGKIQDSLSSTASALGKLQDVVN | |
| | QNAQALNTLVKQLSSNFGAISSVLNDILSRLDPPEAEVQIDRLI | |
| | TGRLQSLQTYVTQQLIRAAEIRASANLAATKMSECVLGQSKR | |
| | VDFCGKGYHLMSFPQSAPHGVVFLHVTYVPAQEKNFTTAPAI | |
| | CHDGKAHFPREGVFVSNGTHWFVTQRNFYEPQIITTDNTFVSG | |
| | NCDVVIGIVNNTVYDPLQPELDSFKEELDKYFKNHTSPDVDLG | |
| | DISGINASVVNIQKEIDRLNEVAKNLNESLIDLQELGKYEQYIK | |
| | WPWYIWLGFIAGLIAIVMVTIMLKKKKRPRNSYKCGTNTMER | |
| | EESEQTKKREKIHIPERSDEAQRVFKSSKTSSCDKSDTCF | |
| PolyA tail | 100 nt | |

SARS-CoV-2 Variant 30

| SEQ ID NO: 91 consists of from 5′ end to 3′ end: 5′ UTR SEQ ID NO: 2, mRNA ORF SEQ ID | | 91 |
|---|---|---|
| NO: 72, and 3′ UTR SEQ ID NO: 4. | | |
| Chemistry | 1-methylpseudouridine | |
| Cap | 7mG(5′)ppp(5′)NlmpNp | |
| 5′UTR | GGGAAAUAAGAGAGAAAAGAAGAGUAAGAAGAAAUAUA | 2 |
| | AGACCCCGGCGCCGCCACC | |
| ORF of mRNA | AUGUUCGUGUUCCUGGUGCUGCUGCCCCUGGUGAGCAGC | 72 |
| Construct | CAGUGCGUGAACCUGACCACCCGGACCCAGCUGCCACCAG | |
| (excluding the stop | CCUACACCAACAGCUUCACCCGGGGCGUCUACUACCCCGA | |
| codon) | CAAGGUGUUCCGGAGCAGCGUCCUGCACAGCACCCAGGA | |
| | CCUGUUCCUGCCCUUCUUCAGCAACGUGACCUGGUUCCAC | |
| | GCCAUCCACGUGAGCGGCACCAACGGCACCAAGCGGUUCG | |
| | ACAACCCCGUGCUGCCCUUCAACGACGGCGUGUACUUCGC | |
| | CAGCACCGAGAAGAGCAACAUCAUCCGGGGCUGGAUCUU | |
| | CGGCACCACCCUGGACAGCAAGACCCAGAGCCUGCUGAUC | |
| | GUGAAUAACGCCACCAACGUGGUGAUCAAGGUGUGCGAG | |
| | UUCCAGUUCUGCAACGACCCCUUCCUGGGCGUGUACUACC | |
| | ACAAGAACAACAAGAGCUGGAUGGAGAGCGAGUUCCGGG | |
| | UGUACAGCAGCGCCAACAACUGCACCUUCGAGUACGUGA | |
| | GCCAGCCCUUCCUGAUGGACCUGGAGGGCAAGCAGGGCA | |
| | ACUUCAAGAACCUGCGGGAGUUCGUGUUCAAGAACAUCG | |
| | ACGGCUACUUCAAGAUCUACAGCAAGCACACCCCAAUCA | |
| | ACCUGGUGCGGGAUCUGCCCCAGGGCUUCUCAGCCCUGG | |
| | AGCCCCUGGUGGACCUGCCCAUCGGCAUCAACAUCACCCG | |
| | GUUCCAGACCCUGCUGGCCCUGCACCGGAGCUACCUGACC | |
| | CCAGGCGACAGCAGCAGCGGGUGGACAGCAGGCGCGGCU | |
| | GCUUACUACGUGGGCUACCUGCAGCCCCGGACCUUCCUGC | |
| | UGAAGUACAACGAGAACGGCACCAUCACCGACGCCGUGG | |
| | ACUGCGCCCUGGACCCUCUGAGCGAGACCAAGUGCACCCU | |
| | GAAGAGCUUCACCGUGGAGAAGGGCAUCUACCAGACCAG | |
| | CAACUUCCGGGUGCAGCCCACCGAGAGCAUCGUGCGGUU | |
| | CCCCAACAUCACCAACCUGUGCCCCUUCGGCGAGGUGUUC | |
| | AACGCCACCCGGUUCGCCAGCGUGUACGCCUGGAACCGGA | |
| | AGCGGAUCAGCAACUGCGUGGCCGACUACAGCGUGCUGU | |
| | ACAACAGCGCCAGCUUCAGCACCUUCAAGUGCUACGGCG | |
| | UGAGCCCCACCAAGCUGAACGACCUGUGCUUCACCAACGU | |
| | GUACGCCGACAGCUUCGUGAUCCGUGGCGACGAGGUGCG | |
| | GCAGAUCGCACCCGGCCAGACAGGCAAGAUCGCCGACUAC | |
| | AACUACAAGCUGCCCGACGACUUCACCGGCUGCGUGAUC | |
| | GCCUGGAACAGCAACAACCUCGACAGCAAGGUGGGCGGC | |
| | AACUACAACUACCUGUACCGGCUGUUCCGGAAGAGCAAC | |
| | CUGAAGCCCUUCGAGCGGGACAUCAGCACCGAGAUCUAC | |
| | CAAGCCGGCUCCACCCCUUGCAACGGCGUGGAGGGCUUCA | |
| | ACUGCUACUUCCCUCUGCAGAGCUACGGCUUCCAGCCCAC | |
| | CAACGGCGUGGGCUACCAGCCCUACCGGGUGGUGGUGCU | |
| | GAGCUUCGAGCUGCUGCACGCCCCAGCCACCGUGUGUGGC | |
| | CCCAAGAAGAGCACCAACCUGGUGAAGAACAAGUGCGUG | |
| | AACUUCAACUUCAACGGCCUUACCGGCACCGGCGUGCUG | |
| | ACCGAGAGCAACAAGAAAUUCCUGCCCUUUCAGCAGUUC | |
| | GGCCGGGACAUCGCCGACACCACCGACGCUGUGCGGGAUC | |
| | CCCAGACCCUGGAGAUCCUGGACAUCACCCCUUGCAGCUU | |
| | CGGCGGCGUGAGCGUGAUCACCCCAGGCACCAACACCAGC | |
| | AACCAGGUGGCCGUGCUGUACCAGGACGUGAACUGCACC | |
| | GAGGUGCCCGUGGCCAUCCACGCCGACCAGCUGACACCCA | |
| | CCUGGCGGGUCUACAGCACCGGCAGCAACGUGUUCCAGA | |
| | CCCGGGCCGGUUGCCUGAUCGGCGCCGAGCACGUGAACA | |
| | ACAGCUACGAGUGCGACAUCCCCAUCGGCGCCGGCAUCUG | |
| | UGCCAGCUACCAGACCCAGACCGUGUCACUGAGGAGCGU | |
| | GGCCAGCCAGAGCAUCAUCGCCUACACCAUGAGCCUGGGC | |
| | GCCGAGAACAGCGUGGCCUACAGCAACAACAGCAUCGCC | |
| | AUCCCCACCAACUUCACCAUCAGCGUGACCACCGAGAUUC | |
| | UGCCCGUGAGCAUGACCAAGACCAGCGUGGACUGCACCA | |
| | UGUACAUCUGCGGCGACAGCACCGAGUGCAGCAACCUGC | |
| | UGCUGCAGUACGGCAGCUUCUGCACCCAGCUGAACCGGG | |
| | CCCUGACCGGCAUCGCCGUGGAGCAGGACAAGAACACCCA | |
| | GGAGGUGUUCGCCCAGGUGAAGCAGAUCUACAAGACCCC | |
| | UCCCAUCAAGGACUUCGGCGGCUUCAACUUCAGCCAGAU | |
| | CCUGCCCGACCCCAGCAAGCCCAGCAAGCGGAGCUUCAUC | |
| | GAGGACCUGCUGUUCAACAAGGUGACCCUAGCCGACGCC | |
| | GGCUUCAUCAAGCAGUACGGCGACUGCCUCGGCGACAUA | |
| | GCCGCCCGGGACCUGAUCUGCGCCCAGAAGUUCAACGGCC | |
| | UGACCGUGCUGCCUCCCCUGCUGACCGACGAGAUGAUCGC | |
| | CCAGUACACCAGCGCCCUGUUAGCCGGAACCAUCACCAGC | |
| | GGCUGGACUUUCGGCGCUGGAGCCGCUCUGCAGAUCCCC | |
| | UUCGCCAUGCAGAUGGCCUACCGGUUCAACGGCAUCGGC | |
| | GUGACCCAGAACGUGCUGUACGAGAACCAGAAGCUGAUC | |
| | GCCAACCAGUUCAACAGCGCCAUCGGCAAGAUCCAGGAC | |
| | AGCCUGAGCAGCACCGCUAGCGCCCUGGGCAAGCUGCAG | |
| | GACGUGGUGAACCAGAACGCCCAGGCCCUGAACACCCUG | |
| | GUGAAGCAGCUGAGCAGCAACUUCGGCGCCAUCAGCAGC | |
| | GUGCUGAACGACAUCCUGAGCCGGCUGGACCCCCCCGAGG | |
| | CCGAGGUGCAGAUCGACCGGCUGAUCACUGGCCGGCUGC | |
| | AGAGCCUGCAGACCUACGUGACCCAGCAGCUGAUCCGGG | |
| | CCGCCGAGAUUCGGGCCAGCGCCAACCUGGCCGCCACCAA | |
| | GAUGAGCGAGUGCGUGCUGGGCCAGAGCAAGCGGGUGGA | |
| | CUUCUGCGGCAAGGGCUACCACCUGAUGAGCUUUCCCCA | |
| | GAGCGCACCCCACGGAGUGGUGUUCCUGCACGUGACCUA | |
| | CGUGCCCGCCCAGGAGAAGAACUUCACCACCGCCCCAGCC | |
| | AUCUGCCACGACGGCAAGGCCCACUUUCCCCGGGAGGGCG | |
| | UGUUCGUGAGCAACGGCACCCACUGGUUCGUGACCCAGC | |
| | GGAACUUCUACGAGCCCCAGAUCAUCACCACCGACAACAC | |
| | CUUCGUGAGCGGCAACUGCGACGUGGUGAUCGGCAUCGU | |
| | GAACAACACCGUGUACGAUCCCCUGCAGCCCGAGCUGGAC | |
| | AGCUUCAAGGAGGAGCUGGACAAGUACUUCAAGAAUCAC | |
| | ACCAGCCCCGACGUGGACCUGGGCGACAUCAGCGGCAUCA | |
| | ACGCCAGCGUGGUGAACAUCCAGAAGGAGAUCGAUCGGC | |
| | UGAACGAGGUGGCCAAGAACCUGAACGAGAGCCUGAUCG | |
| | ACCUGCAGGAGCUGGGCAAGUACGAGCAGUACAUCAAGU | |
| | GGCCCUGGUACAUCUGGCUGGGCUUCAUCGCCGGCCUGA | |
| | UCGCCAUCGUGAUGGUGACCAUCAUGCUGAAGCGGCAGU | |
| | ACAAGGACAUGAUGAGCGAGGGAGGACCACCUGGCGCUG | |
| | AGCCACAG | |
| 3′UTR | UGAUAAUAGGCUGGAGCCUCGGUGGCCUAGCUUCUUGCC | 4 |
| | CCUUGGGCCUCCCCCCAGCCCCUCCUCCCCUUCCUGCACC | |
| | CGUACCCCCGUGGUCUUUGAAUAAAGUCUGAGUGGGCGG | |
| | C | |
| Corresponding amino | MFVFLVLLPLVSSQCVNLTTRTQLPPAYTNSFTRGVYYPDKVF | 73 |
| acid sequence | RSSVLHSTQDLFLPFFSNVTWFHAIHVSGTNGTKRFDNPVLPF | |
| | NDGVYFASTEKSNIIRGWIFGTTLDSKTQSLLIVNNATNVVIKV | |
| | CEFQFCNDPFLGVYYHKNNKSWMESEFRVYSSANNCTFEYVS | |
| | QPFLMDLEGKQGNFKNLREFVFKNIDGYFKIYSKHTPINLVRD | |
| | LPQGFSALEPLVDLPIGINITRFQTLLALHRSYLTPGDSSSGWT | |
| | AGAAAYYVGYLQPRTFLLKYNENGTITDAVDCALDPLSETKC | |
| | TLKSFTVEKGIYQTSNFRVQPTESIVRFPNITNLCPFGEVFNATR | |
| | FASVYAWNRKRISNCVADYSVLYNSASFSTFKCYGVSPTKLN | |
| | DLCFTNVYADSFVIRGDEVRQIAPGQTGKIADYNYKLPDDFTG | |
| | CVIAWNSNNLDSKVGGNYNYLYRLFRKSNLKPFERDISTEIYQ | |
| | AGSTPCNGVEGFNCYFPLQSYGFQPTNGVGYQPYRVVVLSFE | |
| | LLHAPATVCGPKKSTNLVKNKCVNFNFNGLTGTGVLTESNKK | |
| | FLPFQQFGRDIADTTDAVRDPQTLEILDITPCSFGGVSVITPGTN | |
| | TSNQVAVLYQDVNCTEVPVAIHADQLTPTWRVYSTGSNVFQT | |
| | RAGCLIGAEHVNNSYECDIPIGAGICASYQTQTVSLRSVASQSII | |
| | AYTMSLGAENSVAYSNNSIAIPTNFTISVTTEILPVSMTKTSVD | |
| | CTMYICGDSTECSNLLLQYGSFCTQLNRALTGIAVEQDKNTQE | |
| | VFAQVKQIYKTPPIKDFGGFNFSQILPDPSKPSKRSFIEDLLFNK | |
| | VTLADAGFIKQYGDCLGDIAARDLICAQKFNGLTVLPPLLTDE | |
| | MIAQYTSALLAGTITSGWTFGAGAALQIPFAMQMAYRFNGIG | |
| | VTQNVLYENQKLIANQFNSAIGKIQDSLSSTASALGKLQDVVN | |
| | QNAQALNTLVKQLSSNFGAISSVLNDILSRLDPPEAEVQIDRLI | |
| | TGRLQSLQTYVTQQLIRAAEIRASANLAATKMSECVLGQSKR | |
| | VDFCGKGYHLMSFPQSAPHGVVFLHVTYVPAQEKNFTTAPAI | |
| | CHDGKAHFPREGVFVSNGTHWFVTQRNFYEPQIITTDNTFVSG | |
| | NCDVVIGIVNNTVYDPLQPELDSFKEELDKYFKNHTSPDVDLG | |
| | DISGINASVVNIQKEIDRLNEVAKNLNESLIDLQELGKYEQYIK | |
| | WPWYIWLGFIAGLIAIVMVTIMLKRQYKDMMSEGGPPGAEPQ | |
| PolyA tail | 100 nt | |

SARS-CoV-2 Variant 31

| SEQ ID NO: 92 consists of from 5′ end to 3′ end: 5′ UTR SEQ ID NO: 2, mRNA ORF SEQ ID | | 92 |
|---|---|---|
| NO: 74, and 3′ UTR SEQ ID NO: 4. | | |
| Chemistry | 1-methylpseudouridine | |
| Cap | 7mG(5ppp(5′)NlmpNp | |
| 5′UTR | GGGAAAUAAGAGAGAAAAGAAGAGUAAGAAGAAAUAUA | 2 |
| | AGACCCCGGCGCCGCCACC | |
| ORF of mRNA | AUGUUCGUGUUCCUGGUGCUGCUGCCCCUGGUGAGCAGC | 74 |
| Construct | CAGUGCGUGAACCUGACCACCCGGACCCAGCUGCCACCAG | |
| (excluding the stop | CCUACACCAACAGCUUCACCCGGGGCGUCUACUACCCCGA | |
| codon) | CAAGGUGUUCCGGAGCAGCGUCCUGCACAGCACCCAGGA | |
| | CCUGUUCCUGCCCUUCUUCAGCAACGUGACCUGGUUCCAC | |
| | GCCAUCCACGUGAGCGGCACCAACGGCACCAAGCGGUUCG | |
| | ACAACCCCGUGCUGCCCUUCAACGACGGCGUGUACUUCGC | |
| | CAGCACCGAGAAGAGCAACAUCAUCCGGGGCUGGAUCUU | |
| | CGGCACCACCCUGGACAGCAAGACCCAGAGCCUGCUGAUC | |
| | GUGAAUAACGCCACCAACGUGGUGAUCAAGGUGUGCGAG | |
| | UUCCAGUUCUGCAACGACCCCUUCCUGGGCGUGUACUACC | |
| | ACAAGAACAACAAGAGCUGGAUGGAGAGCGAGUUCCGGG | |
| | UGUACAGCAGCGCCAACAACUGCACCUUCGAGUACGUGA | |
| | GCCAGCCCUUCCUGAUGGACCUGGAGGGCAAGCAGGGCA | |
| | ACUUCAAGAACCUGCGGGAGUUCGUGUUCAAGAACAUCG | |
| | ACGGCUACUUCAAGAUCUACAGCAAGCACACCCCAAUCA | |
| | ACCUGGUGCGGGAUCUGCCCCAGGGCUUCUCAGCCCUGG | |
| | AGCCCCUGGUGGACCUGCCCAUCGGCAUCAACAUCACCCG | |
| | GUUCCAGACCCUGCUGGCCCUGCACCGGAGCUACCUGACC | |
| | CCAGGCGACAGCAGCAGCGGGUGGACAGCAGGCGCGGCU | |
| | GCUUACUACGUGGGCUACCUGCAGCCCCGGACCUUCCUGC | |
| | UGAAGUACAACGAGAACGGCACCAUCACCGACGCCGUGG | |
| | ACUGCGCCCUGGACCCUCUGAGCGAGACCAAGUGCACCCU | |
| | GAAGAGCUUCACCGUGGAGAAGGGCAUCUACCAGACCAG | |
| | CAACUUCCGGGUGCAGCCCACCGAGAGCAUCGUGCGGUU | |
| | CCCCAACAUCACCAACCUGUGCCCCUUCGGCGAGGUGUUC | |
| | AACGCCACCCGGUUCGCCAGCGUGUACGCCUGGAACCGGA | |
| | AGCGGAUCAGCAACUGCGUGGCCGACUACAGCGUGCUGU | |
| | ACAACAGCGCCAGCUUCAGCACCUUCAAGUGCUACGGCG | |
| | UGAGCCCCACCAAGCUGAACGACCUGUGCUUCACCAACGU | |
| | GUACGCCGACAGCUUCGUGAUCCGUGGCGACGAGGUGCG | |
| | GCAGAUCGCACCCGGCCAGACAGGCAAGAUCGCCGACUAC | |
| | AACUACAAGCUGCCCGACGACUUCACCGGCUGCGUGAUC | |
| | GCCUGGAACAGCAACAACCUCGACAGCAAGGUGGGCGGC | |
| | AACUACAACUACCUGUACCGGCUGUUCCGGAAGAGCAAC | |
| | CUGAAGCCCUUCGAGCGGGACAUCAGCACCGAGAUCUAC | |
| | CAAGCCGGCUCCACCCCUUGCAACGGCGUGGAGGGCUUCA | |
| | ACUGCUACUUCCCUCUGCAGAGCUACGGCUUCCAGCCCAC | |
| | CAACGGCGUGGGCUACCAGCCCUACCGGGUGGUGGUGCU | |
| | GAGCUUCGAGCUGCUGCACGCCCCAGCCACCGUGUGUGGC | |
| | CCCAAGAAGAGCACCAACCUGGUGAAGAACAAGUGCGUG | |
| | AACUUCAACUUCAACGGCCUUACCGGCACCGGCGUGCUG | |
| | ACCGAGAGCAACAAGAAAUUCCUGCCCUUUCAGCAGUUC | |
| | GGCCGGGACAUCGCCGACACCACCGACGCUGUGCGGGAUC | |
| | CCCAGACCCUGGAGAUCCUGGACAUCACCCCUUGCAGCUU | |
| | CGGCGGCGUGAGCGUGAUCACCCCAGGCACCAACACCAGC | |
| | AACCAGGUGGCCGUGCUGUACCAGGACGUGAACUGCACC | |
| | GAGGUGCCCGUGGCCAUCCACGCCGACCAGCUGACACCCA | |
| | CCUGGCGGGUCUACAGCACCGGCAGCAACGUGUUCCAGA | |
| | CCCGGGCCGGUUGCCUGAUCGGCGCCGAGCACGUGAACA | |
| | ACAGCUACGAGUGCGACAUCCCCAUCGGCGCCGGCAUCUG | |
| | UGCCAGCUACCAGACCCAGACCGUGUCACUGAGGAGCGU | |
| | GGCCAGCCAGAGCAUCAUCGCCUACACCAUGAGCCUGGGC | |
| | GCCGAGAACAGCGUGGCCUACAGCAACAACAGCAUCGCC | |
| | AUCCCCACCAACUUCACCAUCAGCGUGACCACCGAGAUUC | |
| | UGCCCGUGAGCAUGACCAAGACCAGCGUGGACUGCACCA | |
| | UGUACAUCUGCGGCGACAGCACCGAGUGCAGCAACCUGC | |
| | UGCUGCAGUACGGCAGCUUCUGCACCCAGCUGAACCGGG | |
| | CCCUGACCGGCAUCGCCGUGGAGCAGGACAAGAACACCCA | |
| | GGAGGUGUUCGCCCAGGUGAAGCAGAUCUACAAGACCCC | |
| | UCCCAUCAAGGACUUCGGCGGCUUCAACUUCAGCCAGAU | |
| | CCUGCCCGACCCCAGCAAGCCCAGCAAGCGGAGCUUCAUC | |
| | GAGGACCUGCUGUUCAACAAGGUGACCCUAGCCGACGCC | |
| | GGCUUCAUCAAGCAGUACGGCGACUGCCUCGGCGACAUA | |
| | GCCGCCCGGGACCUGAUCUGCGCCCAGAAGUUCAACGGCC | |
| | UGACCGUGCUGCCUCCCCUGCUGACCGACGAGAUGAUCGC | |
| | CCAGUACACCAGCGCCCUGUUAGCCGGAACCAUCACCAGC | |
| | GGCUGGACUUUCGGCGCUGGAGCCGCUCUGCAGAUCCCC | |
| | UUCGCCAUGCAGAUGGCCUACCGGUUCAACGGCAUCGGC | |
| | GUGACCCAGAACGUGCUGUACGAGAACCAGAAGCUGAUC | |
| | GCCAACCAGUUCAACAGCGCCAUCGGCAAGAUCCAGGAC | |
| | AGCCUGAGCAGCACCGCUAGCGCCCUGGGCAAGCUGCAG | |
| | GACGUGGUGAACCAGAACGCCCAGGCCCUGAACACCCUG | |
| | GUGAAGCAGCUGAGCAGCAACUUCGGCGCCAUCAGCAGC | |
| | GUGCUGAACGACAUCCUGAGCCGGCUGGACAAGGUGGAG | |
| | GCCGAGGUGCAGAUCGACCGGCUGAUCACUGGCCGGCUG | |
| | CAGAGCCUGCAGACCUACGUGACCCAGCAGCUGAUCCGG | |
| | GCCGCCGAGAUUCGGGCCAGCGCCAACCUGGCCGCCACCA | |
| | AGAUGAGCGAGUGCGUGCUGGGCCAGAGCAAGCGGGUGG | |
| | ACUUCUGCGGCAAGGGCUACCACCUGAUGAGCUUUCCCC | |
| | AGAGCGCACCCCACGGAGUGGUGUUCCUGCACGUGACCU | |
| | ACGUGCCCGCCCAGGAGAAGAACUUCACCACCGCCCCAGC | |
| | CAUCUGCCACGACGGCAAGGCCCACUUUCCCCGGGAGGGC | |
| | GUGUUCGUGAGCAACGGCACCCACUGGUUCGUGACCCAG | |
| | CGGAACUUCUACGAGCCCCAGAUCAUCACCACCGACAACA | |
| | CCUUCGUGAGCGGCAACUGCGACGUGGUGAUCGGCAUCG | |
| | UGAACAACACCGUGUACGAUCCCCUGCAGCCCGAGCUGG | |
| | ACAGCUUCAAGGAGGAGCUGGACAAGUACUUCAAGAAUC | |
| | ACACCAGCCCCGACGUGGACCUGGGCGACAUCAGCGGCAU | |
| | CAACGCCAGCGUGGUGAACAUCCAGAAGGAGAUCGAUCG | |
| | GCUGAACGAGGUGGCCAAGAACCUGAACGAGAGCCUGAU | |
| | CGACCUGCAGGAGCUGGGCAAGUACGAGCAGUACAUCAA | |
| | GUGGCCCUGGUACAUCUGGCUGGGCUUCAUCGCCGGCCU | |
| | GAUCGCCAUCGUGAUGGUGACCAUCAUGCUGUGCUGCAU | |
| | GACCAGCUGCUGCAGCUGCCUGAAGGGCUGUUGCAGCUG | |
| | CGGCAGCUGCUGCAAGUUCGACGAGGACGACAGCGAGCC | |
| | CGUGCUGAAGGGCGUG | |
| 3′UTR | UGAUAAUAGGCUGGAGCCUCGGUGGCCUAGCUUCUUGCC | 4 |
| | CCUUGGGCCUCCCCCCAGCCCCUCCUCCCCUUCCUGCACC | |
| | CGUACCCCCGUGGUCUUUGAAUAAAGUCUGAGUGGGCGG | |
| | C | |
| Corresponding amino | MFVFLVLLPLVSSQCVNLTTRTQLPPAYTNSFTRGVYYPDKVF | 75 |
| acid sequence | RSSVLHSTQDLFLPFFSNVTWFHAIHVSGTNGTKRFDNPVLPF | |
| | NDGVYFASTEKSNIIRGWIFGTTLDSKTQSLLIVNNATNVVIKV | |
| | CEFQFCNDPFLGVYYHKNNKSWMESEFRVYSSANNCTFEYVS | |
| | QPFLMDLEGKQGNFKNLREFVFKNIDGYFKIYSKHTPINLVRD | |
| | LPQGFSALEPLVDLPIGINITRFQTLLALHRSYLTPGDSSSGWT | |
| | AGAAAYYVGYLQPRTFLLKYNENGTITDAVDCALDPLSETKC | |
| | TLKSFTVEKGIYQTSNFRVQPTESIVRFPNITNLCPFGEVFNATR | |
| | FASVYAWNRKRISNCVADYSVLYNSASFSTFKCYGVSPTKLN | |
| | DLCFTNVYADSFVIRGDEVRQIAPGQTGKIADYNYKLPDDFTG | |
| | CVIAWNSNNLDSKVGGNYNYLYRLFRKSNLKPFERDISTEIYQ | |
| | AGSTPCNGVEGFNCYFPLQSYGFQPTNGVGYQPYRVVVLSFE | |
| | LLHAPATVCGPKKSTNLVKNKCVNFNFNGLTGTGVLTESNKK | |
| | FLPFQQFGRDIADTTDAVRDPQTLEILDITPCSFGGVSVITPGTN | |
| | TSNQVAVLYQDVNCTEVPVAIHADQLTPTWRVYSTGSNVFQT | |
| | RAGCLIGAEHVNNSYECDIPIGAGICASYQTQTVSLRSVASQSII | |
| | AYTMSLGAENSVAYSNNSIAIPTNFTISVTTEILPVSMTKTSVD | |
| | CTMYICGDSTECSNLLLQYGSFCTQLNRALTGIAVEQDKNTQE | |
| | VFAQVKQIYKTPPIKDFGGFNFSQILPDPSKPSKRSFIEDLLFNK | |
| | VTLADAGFIKQYGDCLGDIAARDLICAQKFNGLTVLPPLLTDE | |
| | MIAQYTSALLAGTITSGWTFGAGAALQIPFAMQMAYRFNGIG | |
| | VTQNVLYENQKLIANQFNSAIGKIQDSLSSTASALGKLQDVVN | |
| | QNAQALNTLVKQLSSNFGAISSVLNDILSRLDKVEAEVQIDRLI | |
| | TGRLQSLQTYVTQQLIRAAEIRASANLAATKMSECVLGQSKR | |
| | VDFCGKGYHLMSFPQSAPHGVVFLHVTYVPAQEKNFTTAPAI | |
| | CHDGKAHFPREGVFVSNGTHWFVTQRNFYEPQIITTDNTFVSG | |
| | NCDVVIGIVNNTVYDPLQPELDSFKEELDKYFKNHTSPDVDLG | |
| | DISGINASVVNIQKEIDRLNEVAKNLNESLIDLQELGKYEQYIK | |
| | WPWYIWLGFIAGLIAIVMVTIMLCCMTSCCSCLKGCCSCGSCC | |
| | KFDEDDSEPVLKGV | |
| PolyA tail | 100 nt | |

SARS-CoV-2 Variant 32

| SEQ ID NO: 93 consists of from 5′ end to 3′ end: 5′ UTR SEQ ID NO: 2, mRNA ORF SEQ ID | | 93 |
|---|---|---|
| NO: 76, and 3′ UTR SEQ ID NO: 4. | | |
| Chemistry | 1-methylpseudouridine | |
| Cap | 7mG(5ppp(5′)NlmpNp | |
| 5′UTR | GGGAAAUAAGAGAGAAAAGAAGAGUAAGAAGAAAUAUA | 2 |
| | AGACCCCGGCGCCGCCACC | |
| ORF of mRNA | AUGUUCGUGUUCCUGGUGCUGCUGCCCCUGGUGAGCAGC | 76 |
| Construct | CAGUGCGUGAACCUGACCACCCGGACCCAGCUGCCACCAG | |
| (excluding the stop | CCUACACCAACAGCUUCACCCGGGGCGUCUACUACCCCGA | |
| codon) | CAAGGUGUUCCGGAGCAGCGUCCUGCACAGCACCCAGGA | |
| | CCUGUUCCUGCCCUUCUUCAGCAACGUGACCUGGUUCCAC | |
| | GCCAUCCACGUGAGCGGCACCAACGGCACCAAGCGGUUCG | |
| | ACAACCCCGUGCUGCCCUUCAACGACGGCGUGUACUUCGC | |
| | CAGCACCGAGAAGAGCAACAUCAUCCGGGGCUGGAUCUU | |
| | CGGCACCACCCUGGACAGCAAGACCCAGAGCCUGCUGAUC | |
| | GUGAAUAACGCCACCAACGUGGUGAUCAAGGUGUGCGAG | |
| | UUCCAGUUCUGCAACGACCCCUUCCUGGGCGUGUACUACC | |
| | ACAAGAACAACAAGAGCUGGAUGGAGAGCGAGUUCCGGG | |
| | UGUACAGCAGCGCCAACAACUGCACCUUCGAGUACGUGA | |
| | GCCAGCCCUUCCUGAUGGACCUGGAGGGCAAGCAGGGCA | |
| | ACUUCAAGAACCUGCGGGAGUUCGUGUUCAAGAACAUCG | |
| | ACGGCUACUUCAAGAUCUACAGCAAGCACACCCCAAUCA | |
| | ACCUGGUGCGGGAUCUGCCCCAGGGCUUCUCAGCCCUGG | |
| | AGCCCCUGGUGGACCUGCCCAUCGGCAUCAACAUCACCCG | |
| | GUUCCAGACCCUGCUGGCCCUGCACCGGAGCUACCUGACC | |
| | CCAGGCGACAGCAGCAGCGGGUGGACAGCAGGCGCGGCU | |
| | GCUUACUACGUGGGCUACCUGCAGCCCCGGACCUUCCUGC | |
| | UGAAGUACAACGAGAACGGCACCAUCACCGACGCCGUGG | |
| | ACUGCGCCCUGGACCCUCUGAGCGAGACCAAGUGCACCCU | |
| | GAAGAGCUUCACCGUGGAGAAGGGCAUCUACCAGACCAG | |
| | CAACUUCCGGGUGCAGCCCACCGAGAGCAUCGUGCGGUU | |
| | CCCCAACAUCACCAACCUGUGCCCCUUCGGCGAGGUGUUC | |
| | AACGCCACCCGGUUCGCCAGCGUGUACGCCUGGAACCGGA | |
| | AGCGGAUCAGCAACUGCGUGGCCGACUACAGCGUGCUGU | |
| | ACAACAGCGCCAGCUUCAGCACCUUCAAGUGCUACGGCG | |
| | UGAGCCCCACCAAGCUGAACGACCUGUGCUUCACCAACGU | |
| | GUACGCCGACAGCUUCGUGAUCCGUGGCGACGAGGUGCG | |
| | GCAGAUCGCACCCGGCCAGACAGGCAAGAUCGCCGACUAC | |
| | AACUACAAGCUGCCCGACGACUUCACCGGCUGCGUGAUC | |
| | GCCUGGAACAGCAACAACCUCGACAGCAAGGUGGGCGGC | |
| | AACUACAACUACCUGUACCGGCUGUUCCGGAAGAGCAAC | |
| | CUGAAGCCCUUCGAGCGGGACAUCAGCACCGAGAUCUAC | |
| | CAAGCCGGCUCCACCCCUUGCAACGGCGUGGAGGGCUUCA | |
| | ACUGCUACUUCCCUCUGCAGAGCUACGGCUUCCAGCCCAC | |
| | CAACGGCGUGGGCUACCAGCCCUACCGGGUGGUGGUGCU | |
| | GAGCUUCGAGCUGCUGCACGCCCCAGCCACCGUGUGUGGC | |
| | CCCAAGAAGAGCACCAACCUGGUGAAGAACAAGUGCGUG | |
| | AACUUCAACUUCAACGGCCUUACCGGCACCGGCGUGCUG | |
| | ACCGAGAGCAACAAGAAAUUCCUGCCCUUUCAGCAGUUC | |
| | GGCCGGGACAUCGCCGACACCACCGACGCUGUGCGGGAUC | |
| | CCCAGACCCUGGAGAUCCUGGACAUCACCCCUUGCAGCUU | |
| | CGGCGGCGUGAGCGUGAUCACCCCAGGCACCAACACCAGC | |
| | AACCAGGUGGCCGUGCUGUACCAGGACGUGAACUGCACC | |
| | GAGGUGCCCGUGGCCAUCCACGCCGACCAGCUGACACCCA | |
| | CCUGGCGGGUCUACAGCACCGGCAGCAACGUGUUCCAGA | |
| | CCCGGGCCGGUUGCCUGAUCGGCGCCGAGCACGUGAACA | |
| | ACAGCUACGAGUGCGACAUCCCCAUCGGCGCCGGCAUCUG | |
| | UGCCAGCUACCAGACCCAGACCGUGUCACUGAGGAGCGU | |
| | GGCCAGCCAGAGCAUCAUCGCCUACACCAUGAGCCUGGGC | |
| | GCCGAGAACAGCGUGGCCUACAGCAACAACAGCAUCGCC | |
| | AUCCCCACCAACUUCACCAUCAGCGUGACCACCGAGAUUC | |
| | UGCCCGUGAGCAUGACCAAGACCAGCGUGGACUGCACCA | |
| | UGUACAUCUGCGGCGACAGCACCGAGUGCAGCAACCUGC | |
| | UGCUGCAGUACGGCAGCUUCUGCACCCAGCUGAACCGGG | |
| | CCCUGACCGGCAUCGCCGUGGAGCAGGACAAGAACACCCA | |
| | GGAGGUGUUCGCCCAGGUGAAGCAGAUCUACAAGACCCC | |
| | UCCCAUCAAGGACUUCGGCGGCUUCAACUUCAGCCAGAU | |
| | CCUGCCCGACCCCAGCAAGCCCAGCAAGCGGAGCUUCAUC | |
| | GAGGACCUGCUGUUCAACAAGGUGACCCUAGCCGACGCC | |
| | GGCUUCAUCAAGCAGUACGGCGACUGCCUCGGCGACAUA | |
| | GCCGCCCGGGACCUGAUCUGCGCCCAGAAGUUCAACGGCC | |
| | UGACCGUGCUGCCUCCCCUGCUGACCGACGAGAUGAUCGC | |
| | CCAGUACACCAGCGCCCUGUUAGCCGGAACCAUCACCAGC | |
| | GGCUGGACUUUCGGCGCUGGAGCCGCUCUGCAGAUCCCC | |
| | UUCGCCAUGCAGAUGGCCUACCGGUUCAACGGCAUCGGC | |
| | GUGACCCAGAACGUGCUGUACGAGAACCAGAAGCUGAUC | |
| | GCCAACCAGUUCAACAGCGCCAUCGGCAAGAUCCAGGAC | |
| | AGCCUGAGCAGCACCGCUAGCGCCCUGGGCAAGCUGCAG | |
| | GACGUGGUGAACCAGAACGCCCAGGCCCUGAACACCCUG | |
| | GUGAAGCAGCUGAGCAGCAACUUCGGCGCCAUCAGCAGC | |
| | GUGCUGAACGACAUCCUGAGCCGGCUGGACCCCCCCGAGG | |
| | CCGAGGUGCAGAUCGACCGGCUGAUCACUGGCCGGCUGC | |
| | AGAGCCUGCAGACCUACGUGACCCAGCAGCUGAUCCGGG | |
| | CCGCCGAGAUUCGGGCCAGCGCCAACCUGGCCGCCACCAA | |
| | GAUGAGCGAGUGCGUGCUGGGCCAGAGCAAGCGGGUGGA | |
| | CUUCUGCGGCAAGGGCUACCACCUGAUGAGCUUUCCCCA | |
| | GAGCGCACCCCACGGAGUGGUGUUCCUGCACGUGACCUA | |
| | CGUGCCCGCCCAGGAGAAGAACUUCACCACCGCCCCAGCC | |
| | AUCUGCCACGACGGCAAGGCCCACUUUCCCCGGGAGGGCG | |
| | UGUUCGUGAGCAACGGCACCCACUGGUUCGUGACCCAGC | |
| | GGAACUUCUACGAGCCCCAGAUCAUCACCACCGACAACAC | |
| | CUUCGUGAGCGGCAACUGCGACGUGGUGAUCGGCAUCGU | |
| | GAACAACACCGUGUACGAUCCCCUGCAGCCCGAGCUGGAC | |
| | AGCUUCAAGGAGGAGCUGGACAAGUACUUCAAGAAUCAC | |
| | ACCAGCCCCGACGUGGACCUGGGCGACAUCAGCGGCAUCA | |
| | ACGCCAGCGUGGUGAACAUCCAGAAGGAGAUCGAUCGGC | |
| | UGAACGAGGUGGCCAAGAACCUGAACGAGAGCCUGAUCG | |
| | ACCUGCAGGAGCUGGGCAAGUACGAGCAGUACAUCAAGU | |
| | GGCCCUGGUACAUCUGGCUGGGCUUCAUCGCCGGCCUGA | |
| | UCGCCAUCGUGAUGGUGACCAUCAUGCUGUGCUGCAUGA | |
| | CCAGCUGCUGCAGCUGCCUGAAGGGCUGUUGCAGCUGCG | |
| | GCAGCUGCUGCAAGUUCGACGAGGACGACAGCGAGCCCG | |
| | UGCUGAAGGGCGUG | |
| 3′UTR | UGAUAAUAGGCUGGAGCCUCGGUGGCCUAGCUUCUUGCC | 4 |
| | CCUUGGGCCUCCCCCCAGCCCCUCCUCCCCUUCCUGCACC | |
| | CGUACCCCCGUGGUCUUUGAAUAAAGUCUGAGUGGGCGG | |
| | C | |
| Corresponding amino | MFVFLVLLPLVSSQCVNLTTRTQLPPAYTNSFTRGVYYPDKVF | 77 |
| acid sequence | RSSVLHSTQDLFLPFFSNVTWFHAIHVSGTNGTKRFDNPVLPF | |
| | NDGVYFASTEKSNIIRGWIFGTTLDSKTQSLLIVNNATNVVIKV | |
| | CEFQFCNDPFLGVYYHKNNKSWMESEFRVYSSANNCTFEYVS | |
| | QPFLMDLEGKQGNFKNLREFVFKNIDGYFKIYSKHTPINLVRD | |
| | LPQGFSALEPLVDLPIGINITRFQTLLALHRSYLTPGDSSSGWT | |
| | AGAAAYYVGYLQPRTFLLKYNENGTITDAVDCALDPLSETKC | |
| | TLKSFTVEKGIYQTSNFRVQPTESIVRFPNITNLCPFGEVFNATR | |
| | FASVYAWNRKRISNCVADYSVLYNSASFSTFKCYGVSPTKLN | |
| | DLCFTNVYADSFVIRGDEVRQIAPGQTGKIADYNYKLPDDFTG | |
| | CVIAWNSNNLDSKVGGNYNYLYRLFRKSNLKPFERDISTEIYQ | |
| | AGSTPCNGVEGFNCYFPLQSYGFQPTNGVGYQPYRVVVLSFE | |
| | LLHAPATVCGPKKSTNLVKNKCVNFNFNGLTGTGVLTESNKK | |
| | FLPFQQFGRDIADTTDAVRDPQTLEILDITPCSFGGVSVITPGTN | |
| | TSNQVAVLYQDVNCTEVPVAIHADQLTPTWRVYSTGSNVFQT | |
| | RAGCLIGAEHVNNSYECDIPIGAGICASYQTQTVSLRSVASQSII | |
| | AYTMSLGAENSVAYSNNSIAIPTNFTISVTTEILPVSMTKTSVD | |
| | CTMYICGDSTECSNLLLQYGSFCTQLNRALTGIAVEQDKNTQE | |
| | VFAQVKQIYKTPPIKDFGGFNFSQILPDPSKPSKRSFIEDLLFNK | |
| | VTLADAGFIKQYGDCLGDIAARDLICAQKFNGLTVLPPLLTDE | |
| | MIAQYTSALLAGTITSGWTFGAGAALQIPFAMQMAYRFNGIG | |
| | VTQNVLYENQKLIANQFNSAIGKIQDSLSSTASALGKLQDVVN | |
| | QNAQALNTLVKQLSSNFGAISSVLNDILSRLDPPEAEVQIDRLI | |
| | TGRLQSLQTYVTQQLIRAAEIRASANLAATKMSECVLGQSKR | |
| | VDFCGKGYHLMSFPQSAPHGVVFLHVTYVPAQEKNFTTAPAI | |
| | CHDGKAHFPREGVFVSNGTHWFVTQRNFYEPQIITTDNTFVSG | |
| | NCDVVIGIVNNTVYDPLQPELDSFKEELDKYFKNHTSPDVDLG | |
| | DISGINASVVNIQKEIDRLNEVAKNLNESLIDLQELGKYEQYIK | |
| | WPWYIWLGFIAGLIAIVMVTIMLCCMTSCCSCLKGCCSCGSCC | |
| | KFDEDDSEPVLKGV | |
| PolyA tail | 100 nt | |

SARS-CoV-2 Variant 33

| SEQ ID NO: 94 consists of from 5′ end to 3′ end: 5′ UTR SEQ ID NO: 2, mRNA ORF SEQ ID | | 94 |
|---|---|---|
| NO: 78, and 3′ UTR SEQ ID NO: 4. | | |
| Chemistry | 1-methylpseudouridine | |
| Cap | 7mG(5ppp(5′)NlmpNp | |
| 5′UTR | GGGAAAUAAGAGAGAAAAGAAGAGUAAGAAGAAAUAUA | 2 |
| | AGACCCCGGCGCCGCCACC | |
| ORF of mRNA | AUGUUCGUGUUCCUGGUGCUGCUGCCCCUGGUGAGCAGC | 78 |
| Construct | CAGUGCGUGAACCUGACCACCCGGACCCAGCUGCCACCAG | |
| (excluding the stop | CCUACACCAACAGCUUCACCCGGGGCGUCUACUACCCCGA | |
| codon) | CAAGGUGUUCCGGAGCAGCGUCCUGCACAGCACCCAGGA | |
| | CCUGUUCCUGCCCUUCUUCAGCAACGUGACCUGGUUCCAC | |
| | GCCAUCCACGUGAGCGGCACCAACGGCACCAAGCGGUUCG | |
| | ACAACCCCGUGCUGCCCUUCAACGACGGCGUGUACUUCGC | |
| | CAGCACCGAGAAGAGCAACAUCAUCCGGGGCUGGAUCUU | |
| | CGGCACCACCCUGGACAGCAAGACCCAGAGCCUGCUGAUC | |
| | GUGAAUAACGCCACCAACGUGGUGAUCAAGGUGUGCGAG | |
| | UUCCAGUUCUGCAACGACCCCUUCCUGGGCGUGUACUACC | |
| | ACAAGAACAACAAGAGCUGGAUGGAGAGCGAGUUCCGGG | |
| | UGUACAGCAGCGCCAACAACUGCACCUUCGAGUACGUGA | |
| | GCCAGCCCUUCCUGAUGGACCUGGAGGGCAAGCAGGGCA | |
| | ACUUCAAGAACCUGCGGGAGUUCGUGUUCAAGAACAUCG | |
| | ACGGCUACUUCAAGAUCUACAGCAAGCACACCCCAAUCA | |
| | ACCUGGUGCGGGAUCUGCCCCAGGGCUUCUCAGCCCUGG | |
| | AGCCCCUGGUGGACCUGCCCAUCGGCAUCAACAUCACCCG | |
| | GUUCCAGACCCUGCUGGCCCUGCACCGGAGCUACCUGACC | |
| | CCAGGCGACAGCAGCAGCGGGUGGACAGCAGGCGCGGCU | |
| | GCUUACUACGUGGGCUACCUGCAGCCCCGGACCUUCCUGC | |
| | UGAAGUACAACGAGAACGGCACCAUCACCGACGCCGUGG | |
| | ACUGCGCCCUGGACCCUCUGAGCGAGACCAAGUGCACCCU | |
| | GAAGAGCUUCACCGUGGAGAAGGGCAUCUACCAGACCAG | |
| | CAACUUCCGGGUGCAGCCCACCGAGAGCAUCGUGCGGUU | |
| | CCCCAACAUCACCAACCUGUGCCCCUUCGGCGAGGUGUUC | |
| | AACGCCACCCGGUUCGCCAGCGUGUACGCCUGGAACCGGA | |
| | AGCGGAUCAGCAACUGCGUGGCCGACUACAGCGUGCUGU | |
| | ACAACAGCGCCAGCUUCAGCACCUUCAAGUGCUACGGCG | |
| | UGAGCCCCACCAAGCUGAACGACCUGUGCUUCACCAACGU | |
| | GUACGCCGACAGCUUCGUGAUCCGUGGCGACGAGGUGCG | |
| | GCAGAUCGCACCCGGCCAGACAGGCAAGAUCGCCGACUAC | |
| | AACUACAAGCUGCCCGACGACUUCACCGGCUGCGUGAUC | |
| | GCCUGGAACAGCAACAACCUCGACAGCAAGGUGGGCGGC | |
| | AACUACAACUACCUGUACCGGCUGUUCCGGAAGAGCAAC | |
| | CUGAAGCCCUUCGAGCGGGACAUCAGCACCGAGAUCUAC | |
| | CAAGCCGGCUCCACCCCUUGCAACGGCGUGGAGGGCUUCA | |
| | ACUGCUACUUCCCUCUGCAGAGCUACGGCUUCCAGCCCAC | |
| | CAACGGCGUGGGCUACCAGCCCUACCGGGUGGUGGUGCU | |
| | GAGCUUCGAGCUGCUGCACGCCCCAGCCACCGUGUGUGGC | |
| | CCCAAGAAGAGCACCAACCUGGUGAAGAACAAGUGCGUG | |
| | AACUUCAACUUCAACGGCCUUACCGGCACCGGCGUGCUG | |
| | ACCGAGAGCAACAAGAAAUUCCUGCCCUUUCAGCAGUUC | |
| | GGCCGGGACAUCGCCGACACCACCGACGCUGUGCGGGAUC | |
| | CCCAGACCCUGGAGAUCCUGGACAUCACCCCUUGCAGCUU | |
| | CGGCGGCGUGAGCGUGAUCACCCCAGGCACCAACACCAGC | |
| | AACCAGGUGGCCGUGCUGUACCAGGACGUGAACUGCACC | |
| | GAGGUGCCCGUGGCCAUCCACGCCGACCAGCUGACACCCA | |
| | CCUGGCGGGUCUACAGCACCGGCAGCAACGUGUUCCAGA | |
| | CCCGGGCCGGUUGCCUGAUCGGCGCCGAGCACGUGAACA | |
| | ACAGCUACGAGUGCGACAUCCCCAUCGGCGCCGGCAUCUG | |
| | UGCCAGCUACCAGACCCAGACCAAUUCACCCCGGAGGGCA | |
| | AGGAGCGUGGCCAGCCAGAGCAUCAUCGCCUACACCAUG | |
| | AGCCUGGGCGCCGAGAACAGCGUGGCCUACAGCAACAAC | |
| | AGCAUCGCCAUCCCCACCAACUUCACCAUCAGCGUGACCA | |
| | CCGAGAUUCUGCCCGUGAGCAUGACCAAGACCAGCGUGG | |
| | ACUGCACCAUGUACAUCUGCGGCGACAGCACCGAGUGCA | |
| | GCAACCUGCUGCUGCAGUACGGCAGCUUCUGCACCCAGCU | |
| | GAACCGGGCCCUGACCGGCAUCGCCGUGGAGCAGGACAA | |
| | GAACACCCAGGAGGUGUUCGCCCAGGUGAAGCAGAUCUA | |
| | CAAGACCCCUCCCAUCAAGGACUUCGGCGGCUUCAACUUC | |
| | AGCCAGAUCCUGCCCGACCCCAGCAAGCCCAGCAAGCGGA | |
| | GCUUCAUCGAGGACCUGCUGUUCAACAAGGUGACCCUAG | |
| | CCGACGCCGGCUUCAUCAAGCAGUACGGCGACUGCCUCGG | |
| | CGACAUAGCCGCCCGGGACCUGAUCUGCGCCCAGAAGUUC | |
| | AACGGCCUGACCGUGCUGCCUCCCCUGCUGACCGACGAGA | |
| | UGAUCGCCCAGUACACCAGCGCCCUGUUAGCCGGAACCAU | |
| | CACCAGCGGCUGGACUUUCGGCGCUGGAGCCGCUCUGCA | |
| | GAUCCCCUUCGCCAUGCAGAUGGCCUACCGGUUCAACGGC | |
| | AUCGGCGUGACCCAGAACGUGCUGUACGAGAACCAGAAG | |
| | CUGAUCGCCAACCAGUUCAACAGCGCCAUCGGCAAGAUCC | |
| | AGGACAGCCUGAGCAGCACCGCUAGCGCCCUGGGCAAGC | |
| | UGCAGGACGUGGUGAACCAGAACGCCCAGGCCCUGAACA | |
| | CCCUGGUGAAGCAGCUGAGCAGCAACUUCGGCGCCAUCA | |
| | GCAGCGUGCUGAACGACAUCCUGAGCCGGCUGGACCCUCC | |
| | CGAGGCCGAGGUGCAGAUCGACCGGCUGAUCACUGGCCG | |
| | GCUGCAGAGCCUGCAGACCUACGUGACCCAGCAGCUGAU | |
| | CCGGGCCGCCGAGAUUCGGGCCAGCGCCAACCUGGCCGCC | |
| | ACCAAGAUGAGCGAGUGCGUGCUGGGCCAGAGCAAGCGG | |
| | GUGGACUUCUGCGGCAAGGGCUACCACCUGAUGAGCUUU | |
| | CCCCAGAGCGCACCCCACGGAGUGGUGUUCCUGCACGUGA | |
| | CCUACGUGCCCGCCCAGGAGAAGAACUUCACCACCGCCCC | |
| | AGCCAUCUGCCACGACGGCAAGGCCCACUUUCCCCGGGAG | |
| | GGCGUGUUCGUGAGCAACGGCACCCACUGGUUCGUGACC | |
| | CAGCGGAACUUCUACGAGCCCCAGAUCAUCACCACCGACA | |
| | ACACCUUCGUGAGCGGCAACUGCGACGUGGUGAUCGGCA | |
| | UCGUGAACAACACCGUGUACGAUCCCCUGCAGCCCGAGCU | |
| | GGACAGCUUCAAGGAGGAGCUGGACAAGUACUUCAAGAA | |
| | UCACACCAGCCCCGACGUGGACCUGGGCGACAUCAGCGGC | |
| | AUCAACGCCAGCGUGGUGAACAUCCAGAAGGAGAUCGAU | |
| | CGGCUGAACGAGGUGGCCAAGAACCUGAACGAGAGCCUG | |
| | AUCGACCUGCAGGAGCUGGGCAAGUACGAGCAGUACAUC | |
| | AAGUGGCCCUGGUACAUCUGGCUGGGCUUCAUCGCCGGC | |
| | CUGAUCGCCAUCGUGAUGGUGACCAUCAUGCUGUGCUGC | |
| | AUGACCAGCUGCUGCAGCUGCCUGAAGGGCUGUUGCAGC | |
| | UGCGGCAGCUGCUGCAAGUUCGACGAGGACGACAGCGAG | |
| | CCCGUGCUGAAGGGCGUG | |
| 3′UTR | UGAUAAUAGGCUGGAGCCUCGGUGGCCUAGCUUCUUGCC | 4 |
| | CCUUGGGCCUCCCCCCAGCCCCUCCUCCCCUUCCUGCACC | |
| | CGUACCCCCGUGGUCUUUGAAUAAAGUCUGAGUGGGCGG | |
| | C | |
| Corresponding amino | MFVFLVLLPLVSSQCVNLTTRTQLPPAYTNSFTRGVYYPDKVF | 79 |
| acid sequence | RSSVLHSTQDLFLPFFSNVTWFHAIHVSGTNGTKRFDNPVLPF | |
| | NDGVYFASTEKSNIIRGWIFGTTLDSKTQSLLIVNNATNVVIKV | |
| | CEFQFCNDPFLGVYYHKNNKSWMESEFRVYSSANNCTFEYVS | |
| | QPFLMDLEGKQGNFKNLREFVFKNIDGYFKIYSKHTPINLVRD | |
| | LPQGFSALEPLVDLPIGINITRFQTLLALHRSYLTPGDSSSGWT | |
| | AGAAAYYVGYLQPRTFLLKYNENGTITDAVDCALDPLSETKC | |
| | TLKSFTVEKGIYQTSNFRVQPTESIVRFPNITNLCPFGEVFNATR | |
| | FASVYAWNRKRISNCVADYSVLYNSASFSTFKCYGVSPTKLN | |
| | DLCFTNVYADSFVIRGDEVRQIAPGQTGKIADYNYKLPDDFTG | |
| | CVIAWNSNNLDSKVGGNYNYLYRLFRKSNLKPFERDISTEIYQ | |
| | AGSTPCNGVEGFNCYFPLQSYGFQPTNGVGYQPYRVVVLSFE | |
| | LLHAPATVCGPKKSTNLVKNKCVNFNFNGLTGTGVLTESNKK | |
| | FLPFQQFGRDIADTTDAVRDPQTLEILDITPCSFGGVSVITPGTN | |
| | TSNQVAVLYQDVNCTEVPVAIHADQLTPTWRVYSTGSNVFQT | |
| | RAGCLIGAEHVNNSYECDIPIGAGICASYQTQTNSPRRARSVA | |
| | SQSIIAYTMSLGAENSVAYSNNSIAIPTNFTISVTTEILPVSMTK | |
| | TSVDCTMYICGDSTECSNLLLQYGSFCTQLNRALTGIAVEQDK | |
| | NTQEVFAQVKQIYKTPPIKDFGGFNFSQILPDPSKPSKRSFIEDL | |
| | LFNKVTLADAGFIKQYGDCLGDIAARDLICAQKFNGLTVLPPL | |
| | LTDEMIAQYTSALLAGTITSGWTFGAGAALQIPFAMQMAYRF | |
| | NGIGVTQNVLYENQKLIANQFNSAIGKIQDSLSSTASALGKLQ | |
| | DVVNQNAQALNTLVKQLSSNFGAISSVLNDILSRLDPPEAEVQ | |
| | IDRLITGRLQSLQTYVTQQLIRAAEIRASANLAATKMSECVLG | |
| | QSKRVDFCGKGYHLMSFPQSAPHGVVFLHVTYVPAQEKNFTT | |
| | APAICHDGKAHFPREGVFVSNGTHWFVTQRNFYEPQIITTDNT | |
| | FVSGNCDVVIGIVNNTVYDPLQPELDSFKEELDKYFKNHTSPD | |
| | VDLGDISGINASVVNIQKEIDRLNEVAKNLNESLIDLQELGKYE | |
| | QYIKWPWYIWLGFIAGLIAIVMVTIMLCCMTSCCSCLKGCCSC | |
| | GSCCKFDEDDSEPVLKGV | |
| PolyA tail | 100 nt | |

CoV2 Membrane Protein

| SEQ ID NO: 95 consists of from 5′ end to 3′ end: 5′ UTR SEQ ID NO: 2, mRNA ORF SEQ ID | | 95 |
|---|---|---|
| NO: 80, and 3′ UTR SEQ ID NO: 4. | | |
| Chemistry | 1-methylpseudouridine | |
| Cap | 7mG(5ppp(5′)NlmpNp | |
| 5′UTR | GGGAAAUAAGAGAGAAAAGAAGAGUAAGAAGAAAUAUA | 2 |
| | AGACCCCGGCGCCGCCACC | |
| ORF of mRNA | AUGGCCGACAGCAACGGCACCAUCACCGUGGAGGAGCUG | 80 |
| Construct | AAGAAGCUGCUGGAGCAGUGGAACCUGGUGAUCGGCUUC | |
| (excluding the stop | CUGUUCCUGACCUGGAUCUGCCUGCUGCAGUUCGCCUAC | |
| codon) | GCCAACCGGAACCGUUUCCUGUACAUCAUCAAGCUGAUC | |
| | UUCCUGUGGCUGCUGUGGCCCGUGACCCUGGCCUGCUUC | |
| | GUGCUGGCCGCCGUGUACCGGAUCAACUGGAUCACCGGC | |
| | GGCAUCGCCAUCGCCAUGGCCUGCCUGGUGGGCCUGAUG | |
| | UGGCUGAGCUACUUCAUCGCCAGCUUCCGGCUGUUCGCCC | |
| | GGACCCGGAGCAUGUGGAGCUUCAACCCCGAGACCAACA | |
| | UCCUGCUGAACGUGCCCCUGCACGGCACAAUCCUGACCCG | |
| | GCCCCUGCUGGAGAGCGAGCUUGUGAUCGGCGCCGUGAU | |
| | CCUGCGGGGCCACCUGAGGAUCGCCGGCCAUCACCUGGGC | |
| | CGGUGCGACAUCAAGGACCUGCCCAAGGAGAUCACCGUG | |
| | GCCACCAGCCGGACCCUGAGCUACUACAAACUGGGCGCCA | |
| | GCCAGAGAGUGGCCGGAGACAGCGGCUUCGCCGCCUACA | |
| | GCCGGUACCGGAUCGGCAACUACAAGCUGAACACCGACC | |
| | ACAGCAGCAGCAGCGACAACAUCGCCCUGCUGGUGCAG | |
| 3′UTR | UGAUAAUAGGCUGGAGCCUCGGUGGCCUAGCUUCUUGCC | 4 |
| | CCUUGGGCCUCCCCCCAGCCCCUCCUCCCCUUCCUGCACC | |
| | CGUACCCCCGUGGUCUUUGAAUAAAGUCUGAGUGGGCGG | |
| | C | |
| Corresponding amino | MADSNGTITVEELKKLLEQWNLVIGFLFLTWICLLQFAYANR | 81 |
| acid sequence | NRFLYIIKLIFLWLLWPVTLACFVLAAVYRINWITGGIAIAMAC | |
| | LVGLMWLSYFIASFRLFARTRSMWSFNPETNILLNVPLHGTIL | |
| | TRPLLESELVIGAVILRGHLRIAGHHLGRCDIKDLPKEITVATS | |
| | RTLSYYKLGASQRVAGDSGFAAYSRYRIGNYKLNTDHSSSSD | |
| | NIALLVQ | |
| PolyA tail | 100 nt | |

CoV2 Envelope Protein

| SEQ ID NO: 96 consists of from 5′ end to 3′ end: 5′ UTR SEQ ID NO: 2, mRNA ORF SEQ ID | | 96 |
|---|---|---|
| NO: 82, and 3′ UTR SEQ ID NO: 4. | | |
| Chemistry | 1-methylpseudouridine | |
| Cap | 7mG(5ppp(5′)NlmpNp | |
| 5′UTR | GGGAAAUAAGAGAGAAAAGAAGAGUAAGAAGAAAUAUA | 2 |
| | AGACCCCGGCGCCGCCACC | |
| ORF of mRNA | AUGUACAGCUUCGUGAGCGAGGAGACCGGCACCCUGAUC | 82 |
| Construct | GUGAACAGCGUGCUGCUGUUCCUGGCCUUCGUGGUGUUC | |
| (excluding the stop | CUGCUGGUGACCCUGGCCAUCCUGACCGCCCUGCGGCUGU | |
| codon) | GUGCCUACUGCUGCAACAUCGUGAACGUGAGCCUGGUGA | |
| | AGCCCAGCUUCUACGUGUACAGCCGGGUGAAGAACCUGA | |
| | ACAGCAGCCGGGUGCCUGACCUGCUGGUG | |
| 3′UTR | UGAUAAUAGGCUGGAGCCUCGGUGGCCUAGCUUCUUGCC | 4 |
| | CCUUGGGCCUCCCCCCAGCCCCUCCUCCCCUUCCUGCACC | |
| | CGUACCCCCGUGGUCUUUGAAUAAAGUCUGAGUGGGCGG | |
| | C | |
| Corresponding amino | MYSFVSEETGTLIVNSVLLFLAFVVFLLVTLAILTALRLCAYCC | 83 |
| acid sequence | NIVNVSLVKPSFYVYSRVKNLNSSRVPDLLV | |
| PolyA tail | 100 nt | |

CoV2 Nucleocapsid Protein

| SEQ ID NO: 97 consists of from 5′ end to 3′ end: 5′ UTR SEQ ID NO: 2, mRNA ORF SEQ ID | | 97 |
|---|---|---|
| NO: 84, and 3′ UTR SEQ ID NO: 4. | | |
| Chemistry | 1-methylpseudouridine | |
| Cap | 7mG(5ppp(5′)NlmpNp | |
| 5′UTR | GGGAAAUAAGAGAGAAAAGAAGAGUAAGAAGAAAUAUA | 2 |
| | AGACCCCGGCGCCGCCACC | |
| ORF of mRNA | AUGAGCGACAACGGCCCUCAGAACCAGCGGAACGCACCCC | 84 |
| Construct | GGAUCACCUUUGGCGGCCCCAGCGAUAGCACCGGCAGCA | |
| (excluding the stop | ACCAGAACGGCGAGAGAUCAGGGGCCCGGAGCAAGCAGC | |
| codon) | GGCGUCCUCAGGGCCUGCCCAACAACACCGCCAGCUGGUU | |
| | CACCGCCCUGACCCAGCACGGCAAGGAGGACCUGAAGUUC | |
| | CCUCGGGGCCAAGGAGUGCCCAUCAACACCAACAGCAGCC | |
| | CCGACGACCAGAUCGGCUACUACAGAAGGGCCACCCGGA | |
| | GGAUCCGGGGAGGGGACGGCAAGAUGAAGGACCUGUCUC | |
| | CCCGGUGGUACUUCUACUAUCUUGGCACGGGCCCUGAAG | |
| | CUGGCCUGCCGUACGGCGCAAACAAGGACGGCAUCAUCU | |
| | GGGUCGCCACCGAGGGAGCCCUGAACACCCCGAAGGACCA | |
| | CAUCGGCACCCGGAAUCCCGCCAACAACGCCGCCAUCGUU | |
| | CUGCAGCUGCCCCAGGGCACCACCCUGCCCAAGGGCUUCU | |
| | ACGCCGAGGGCAGCAGAGGCGGCUCACAGGCCAGCAGCC | |
| | GGUCAAGCAGCCGGAGCCGGAACAGCAGCCGGAACUCCA | |
| | CACCCGGCUCUAGCCGAGGCACAAGCCCCGCCAGAAUGGC | |
| | AGGAAACGGCGGCGACGCUGCCUUAGCCCUGCUGUUGCU | |
| | GGACCGGCUGAACCAGCUCGAGAGCAAGAUGAGCGGCAA | |
| | GGGUCAGCAGCAGCAAGGCCAAACCGUGACCAAGAAGAG | |
| | CGCCGCCGAGGCUAGCAAGAAGCCCCGGCAGAAGCGGACC | |
| | GCCACCAAGGCCUACAACGUGACCCAGGCCUUCGGUCGGA | |
| | GAGGCCCCGAGCAGACCCAGGGCAACUUCGGCGACCAGG | |
| | AGCUGAUCCGGCAGGGCACCGACUACAAGCACUGGCCCCA | |
| | GAUCGCCCAGUUCGCCCCUAGCGCCUCAGCCUUCUUCGGC | |
| | AUGAGCCGGAUCGGCAUGGAGGUGACUCCCAGCGGCACC | |
| | UGGCUGACCUACACCGGCGCCAUCAAGCUGGACGACAAG | |
| | GACCCCAACUUCAAGGACCAGGUGAUCCUGCUGAACAAG | |
| | CACAUCGACGCCUACAAGACCUUUCCGCCCACCGAGCCCA | |
| | AGAAGGACAAGAAGAAGAAGGCCGACGAGACCCAGGCCC | |
| | UGCCCCAACGGCAGAAGAAGCAGCAGACCGUCACCUUAC | |
| | UGCCCGCAGCCGACCUGGACGACUUCAGCAAGCAGCUGCA | |
| | GCAGAGCAUGAGCAGCGCCGACAGCACCCAGGCC | |
| 3′UTR | UGAUAAUAGGCUGGAGCCUCGGUGGCCUAGCUUCUUGCC | 4 |
| | CCUUGGGCCUCCCCCCAGCCCCUCCUCCCCUUCCUGCACC | |
| | CGUACCCCCGUGGUCUUUGAAUAAAGUCUGAGUGGGCGG | |
| | C | |
| Corresponding amino | MSDNGPQNQRNAPRITFGGPSDSTGSNQNGERSGARSKQRRP | 85 |
| acid sequence | QGLPNNTASWFTALTQHGKEDLKFPRGQGVPINTNSSPDDQIG | |
| | YYRRATRRIRGGDGKMKDLSPRWYFYYLGTGPEAGLPYGAN | |
| | KDGIIWVATEGALNTPKDHIGTRNPANNAAIVLQLPQGTTLPK | |
| | GFYAEGSRGGSQASSRSSSRSRNSSRNSTPGSSRGTSPARMAG | |
| | NGGDAALALLLLDRLNQLESKMSGKGQQQQGQTVTKKSAAE | |
| | ASKKPRQKRTATKAYNVTQAFGRRGPEQTQGNFGDQELIRQG | |
| | TDYKHWPQIAQFAPSASAFFGMSRIGMEVTPSGTWLTYTGAI | |
| | KLDDKDPNFKDQVILLNKHIDAYKTFPPTEPKKDKKKKADET | |
| | QALPQRQKKQQTVTLLPAADLDDFSKQLQQSMSSADSTQA | |
| PolyA tail | 100 nt | |

* It should be understood that any one of the open reading frames and/or corresponding amino acid sequences described in Table 1 may include or exclude the signal sequence. It should also be understood that the signal sequence may be replaced by a different signal sequence, for example, any one of SEQ ID NOs: 38-43.

### EQUIVALENTS

[0407] All references, patents and patent applications disclosed herein are incorporated by reference with respect to the subject matter for which each is cited, which in some cases may encompass the entirety of the document.

[0408] The indefinite articles “a” and “an,” as used herein in the specification and in the claims, unless clearly indicated to the contrary, should be understood to mean “at least one.”

[0409] It should also be understood that, unless clearly indicated to the contrary, in any methods claimed herein that include more than one step or act, the order of the steps or acts of the method is not necessarily limited to the order in which the steps or acts of the method are recited.

[0410] In the claims, as well as in the specification above, all transitional phrases such as “comprising,” “including,” “carrying,” “having,” “containing,” “involving,” “holding,” “composed of,” and the like are to be understood to be open-ended, i.e., to mean including but not limited to. Only the transitional phrases “consisting of” and “consisting essentially of” shall be closed or semi-closed transitional phrases, respectively, as set forth in the United States Patent Office Manual of Patent Examining Procedures, Section 2111.03.

[0411] The terms “about” and “substantially” preceding a numerical value mean±10% of the recited numerical value.

[0412] Where a range of values is provided, each value between the upper and lower ends of the range are specifically contemplated and described herein.

[0413] The entire contents of International Application Nos. PCT/US2015/02740, PCT/US2016/043348, PCT/US2016/043332, PCT/US2016/058327, PCT/US2016/058324, PCT/US2016/058314, PCT/US2016/058310, PCT/US2016/058321, PCT/US2016/058297, PCT/US2016/058319, and PCT/US2016/058314 are incorporated herein by reference.

The application's sequence listing, which the Patent Office published only in electronic form, follows.

SEQUENCE LISTING (106 sequences)

SEQ ID NO: 1 - RNA, 3995 nt, Artificial Sequence
  Synthetic
gggaaauaagagagaaaagaagaguaagaagaaauauaagaccccggcgccgccaccauguucgucuuccucgucuugcugccgcuggugucgagccagugcgugaaccucaccacaaggacgcagcucccaccggccuacacgaacagcuucacgcgcggcguguacuaccccgacaagguguuccggucgucgguccuccacuccacgcaggaccucuuccugcccuucuucagcaacgugaccugguuccacgccauccacgucuccgggacgaacgggacgaagcgguucgacaacccgguccucccguucaacgacggcgucuacuucgcgagcacggagaagucgaacaucauccggggcuggaucuucggcacgacccuggacucgaagacccagucccuacuuaucgugaacaacgccaccaacgucgucaucaaggucugcgaguuccaguucugcaacgaccccuuccucggcgucuacuaccacaagaacaacaagucguggauggagucggaguuccggguguacagcucggcgaacaacugcaccuucgaguacgugucgcagccguuccucauggaccucgagggcaagcaggguaacuucaagaaccugcgcgaguucgucuucaagaacaucgacggcuacuucaagaucuacuccaagcacacgcccaucaaccugguccgcgaccucccgcaaggcuucuccgcccucgagccucuggucgaccugccgaucggcaucaacaucacgagguuccagacgcuccuggcgcugcaccggucguaccugacgccaggcgacuccuccucgggcuggacagcaggcgcggcugccuacuacgucggguaccugcagccccgcacguuccuccugaaguacaacgagaacggcacuaucacggacgccgucgacugcgcccuggacccacugucggagacgaagugcacgcugaagucguucaccguggagaaggguaucuaccagaccuccaacuuccggguccagccgacggagucgaucgugcgguuccccaacaucacgaaccugugccccuucggugaggucuucaacgccacccgguucgcgucggucuacgcguggaaccguaagcgcaucucgaacugcguggcggacuacuccguccucuacaacagcgcguccuucagcaccuucaagugcuacggcgucagccccacgaagcugaacgaccucugcuucaccaacgucuacgcagacuccuucgugauccggggugacgaggugcgacagaucgccccuggucagaccgggaagaucgccgacuacaacuacaagcugcccgacgacuucaccggcugcgugaucgcguggaacagcaacaaccuggacuccaaggucggagguaacuacaacuaccucuaccggcuguuccgcaaguccaaccugaagccguucgagcgggacaucuccacggagaucuaccaagccggcucgaccccuuguaacgggguggagggguucaacugcuacuucccacugcaguccuacggguuccagcccaccaacggggucggguaccagccguaccgcguggugguccuguccuucgagcugcugcacgcgccagccacggugugcgggccaaagaagagcacgaaccuggucaagaacaagugcgucaacuucaacuucaacggccugacggggacagggguccucacggagucgaacaagaaguuccugccguuccagcaguucggccgugacaucgcagacacgacugacgccguccgcgacccucagacccucgagauccucgacaucaccccgugcucguucggcggagugagcgucaucaccccggggaccaacacaucgaaccagguggccguccuguaccaggacgucaacugcacggaggucccuguggcgauccacgccgaccagcucacgcccaccuggcgcgucuacuccaccggguccaacguguuccagacccgcgcaggcugccugaucggggccgagcacgucaacaacagcuacgagugcgacauccccaucggagcgggcaucugcgccagcuaccagacgcagacgaacucuccaaggcgcgcucguagcguggccucccaguccaucaucgcguacacgaugucccuuggggccgagaacucggucgcauacagcaacaacuccaucgccauccccaccaacuucacgaucucggucaccaccgagauccucccggucagcaugacgaagacgucgguggacugcaccauguacaucugcggggacagcacggagugcucgaaccugcuccugcaguacgggagcuucugcacccagcugaacagggcgcugacggggaucgcgguggagcaggacaagaacacccaggagguguucgcgcaggugaagcagaucuacaagacgccuccaaucaaggacuucggcggguucaacuucucgcagauccuccccgacccguccaagccgucgaagcggucguucaucgaggaccugcucuucaacaaggugacguuggccgacgcgggcuucaucaagcaguacggggacugccuuggggacaucgcugcccgcgaccucaucugcgcccagaaguucaacgggcugacugugcucccgccccugcugacggacgagaugaucgcgcaguacacguccgcgcugcucgcuggaacgaucaccuccggguggaccuucggcgcuggagcggcucugcagaucccguucgcgaugcagauggcguaccgguucaacggcaucggggugacccagaacguccucuacgagaaccagaagcugaucgccaaccaguucaacuccgcgaucggcaagauccaggacucgcugagcuccacggcuuccgcccucgggaagcuucaggacguggugaaccagaacgcccaggcccucaacacccuggugaagcagcugagcucgaacuucggcgccaucucgagcgugcucaacgacauccugagccgucuggacccucccgaggcggaggugcagaucgaccggcucaucacgggccggcuucagucccugcagacguacgugacccagcagcucauacgggcggcggagauacgcgccuccgccaaccuggccgcgacgaagauguccgagugcguccucggacagagcaagcgcguggacuucugcggcaagggguaccaccucaugagcuuuccccagucggcuccucacggggucgucuuccugcacgugacguacgucccggcgcaggagaagaacuucaccaccgccccagcgaucugccacgacgggaaggcgcacuucccgcgcgagggcgucuucgucuccaacgggacccacugguucgucacccagcggaacuucuacgagccgcagaucaucacgaccgacaacacguucguauccgggaacugcgacgucgucaucggcaucgucaacaacacggucuacgacccacugcagccggagcuggacucguucaaggaggagcuggacaaguauuucaagaaccacaccucgcccgacguggaccugggcgacaucagcgggaucaacgcgucggucgugaacauccagaaggagaucgaccgacugaacgaggucgccaagaaccugaacgagucccugaucgaccugcaagagcucggcaaguacgagcaguacaucaaguggccuugguacaucuggcucggcuucaucgcggggcugaucgccaucgugauggucaccaucauguugugcugcaugaccuccugcugcucgugccucaaggggugcugcagcugcggguccugcugcaaguucgacgaggacgacucggagccgguccucaagggcgucaagcuccacuacaccugauaauaggcuggagccucgguggccuagcuucuugccccuugggccuccccccagccccuccuccccuuccugcacccguacccccguggucuuugaauaaagucugagugggcggc

SEQ ID NO: 2 - RNA, 57 nt, Artificial Sequence
  Synthetic
gggaaauaagagagaaaagaagaguaagaagaaauauaagaccccggcgccgccacc

SEQ ID NO: 3 - RNA, 3819 nt, Artificial Sequence
  Synthetic
auguucgucuuccucgucuugcugccgcuggugucgagccagugcgugaaccucaccacaaggacgcagcucccaccggccuacacgaacagcuucacgcgcggcguguacuaccccgacaagguguuccggucgucgguccuccacuccacgcaggaccucuuccugcccuucuucagcaacgugaccugguuccacgccauccacgucuccgggacgaacgggacgaagcgguucgacaacccgguccucccguucaacgacggcgucuacuucgcgagcacggagaagucgaacaucauccggggcuggaucuucggcacgacccuggacucgaagacccagucccuacuuaucgugaacaacgccaccaacgucgucaucaaggucugcgaguuccaguucugcaacgaccccuuccucggcgucuacuaccacaagaacaacaagucguggauggagucggaguuccggguguacagcucggcgaacaacugcaccuucgaguacgugucgcagccguuccucauggaccucgagggcaagcaggguaacuucaagaaccugcgcgaguucgucuucaagaacaucgacggcuacuucaagaucuacuccaagcacacgcccaucaaccugguccgcgaccucccgcaaggcuucuccgcccucgagccucuggucgaccugccgaucggcaucaacaucacgagguuccagacgcuccuggcgcugcaccggucguaccugacgccaggcgacuccuccucgggcuggacagcaggcgcggcugccuacuacgucggguaccugcagccccgcacguuccuccugaaguacaacgagaacggcacuaucacggacgccgucgacugcgcccuggacccacugucggagacgaagugcacgcugaagucguucaccguggagaaggguaucuaccagaccuccaacuuccggguccagccgacggagucgaucgugcgguuccccaacaucacgaaccugugccccuucggugaggucuucaacgccacccgguucgcgucggucuacgcguggaaccguaagcgcaucucgaacugcguggcggacuacuccguccucuacaacagcgcguccuucagcaccuucaagugcuacggcgucagccccacgaagcugaacgaccucugcuucaccaacgucuacgcagacuccuucgugauccggggugacgaggugcgacagaucgccccuggucagaccgggaagaucgccgacuacaacuacaagcugcccgacgacuucaccggcugcgugaucgcguggaacagcaacaaccuggacuccaaggucggagguaacuacaacuaccucuaccggcuguuccgcaaguccaaccugaagccguucgagcgggacaucuccacggagaucuaccaagccggcucgaccccuuguaacgggguggagggguucaacugcuacuucccacugcaguccuacggguuccagcccaccaacggggucggguaccagccguaccgcguggugguccuguccuucgagcugcugcacgcgccagccacggugugcgggccaaagaagagcacgaaccuggucaagaacaagugcgucaacuucaacuucaacggccugacggggacagggguccucacggagucgaacaagaaguuccugccguuccagcaguucggccgugacaucgcagacacgacugacgccguccgcgacccucagacccucgagauccucgacaucaccccgugcucguucggcggagugagcgucaucaccccggggaccaacacaucgaaccagguggccguccuguaccaggacgucaacugcacggaggucccuguggcgauccacgccgaccagcucacgcccaccuggcgcgucuacuccaccggguccaacguguuccagacccgcgcaggcugccugaucggggccgagcacgucaacaacagcuacgagugcgacauccccaucggagcgggcaucugcgccagcuaccagacgcagacgaacucuccaaggcgcgcucguagcguggccucccaguccaucaucgcguacacgaugucccuuggggccgagaacucggucgcauacagcaacaacuccaucgccauccccaccaacuucacgaucucggucaccaccgagauccucccggucagcaugacgaagacgucgguggacugcaccauguacaucugcggggacagcacggagugcucgaaccugcuccugcaguacgggagcuucugcacccagcugaacagggcgcugacggggaucgcgguggagcaggacaagaacacccaggagguguucgcgcaggugaagcagaucuacaagacgccuccaaucaaggacuucggcggguucaacuucucgcagauccuccccgacccguccaagccgucgaagcggucguucaucgaggaccugcucuucaacaaggugacguuggccgacgcgggcuucaucaagcaguacggggacugccuuggggacaucgcugcccgcgaccucaucugcgcccagaaguucaacgggcugacugugcucccgccccugcugacggacgagaugaucgcgcaguacacguccgcgcugcucgcuggaacgaucaccuccggguggaccuucggcgcuggagcggcucugcagaucccguucgcgaugcagauggcguaccgguucaacggcaucggggugacccagaacguccucuacgagaaccagaagcugaucgccaaccaguucaacuccgcgaucggcaagauccaggacucgcugagcuccacggcuuccgcccucgggaagcuucaggacguggugaaccagaacgcccaggcccucaacacccuggugaagcagcugagcucgaacuucggcgccaucucgagcgugcucaacgacauccugagccgucuggacccucccgaggcggaggugcagaucgaccggcucaucacgggccggcuucagucccugcagacguacgugacccagcagcucauacgggcggcggagauacgcgccuccgccaaccuggccgcgacgaagauguccgagugcguccucggacagagcaagcgcguggacuucugcggcaagggguaccaccucaugagcuuuccccagucggcuccucacggggucgucuuccugcacgugacguacgucccggcgcaggagaagaacuucaccaccgccccagcgaucugccacgacgggaaggcgcacuucccgcgcgagggcgucuucgucuccaacgggacccacugguucgucacccagcggaacuucuacgagccgcagaucaucacgaccgacaacacguucguauccgggaacugcgacgucgucaucggcaucgucaacaacacggucuacgacccacugcagccggagcuggacucguucaaggaggagcuggacaaguauuucaagaaccacaccucgcccgacguggaccugggcgacaucagcgggaucaacgcgucggucgugaacauccagaaggagaucgaccgacugaacgaggucgccaagaaccugaacgagucccugaucgaccugcaagagcucggcaaguacgagcaguacaucaaguggccuugguacaucuggcucggcuucaucgcggggcugaucgccaucgugauggucaccaucauguugugcugcaugaccuccugcugcucgugccucaaggggugcugcagcugcggguccugcugcaaguucgacgaggacgacucggagccgguccucaagggcgucaagcuccacuacacc

SEQ ID NO: 4 - RNA, 119 nt, Artificial Sequence
  Synthetic
ugauaauaggcuggagccucgguggccuagcuucuugccccuugggccuccccccagccccuccuccccuuccugcacccguacccccguggucuuugaauaaagucugagugggcggc

SEQ ID NO: 5 - protein, 1273 aa, Artificial Sequence
  Synthetic
MFVFLVLLPLVSSQCVNLTTRTQLPPAYTNSFTRGVYYPDKVFRSSVLHSTQDLFLPFFSNVTWFHAIHVSGTNGTKRFDNPVLPFNDGVYFASTEKSNIIRGWIFGTTLDSKTQSLLIVNNATNVVIKVCEFQFCNDPFLGVYYHKNNKSWMESEFRVYSSANNCTFEYVSQPFLMDLEGKQGNFKNLREFVFKNIDGYFKIYSKHTPINLVRDLPQGFSALEPLVDLPIGINITRFQTLLALHRSYLTPGDSSSGWTAGAAAYYVGYLQPRTFLLKYNENGTITDAVDCALDPLSETKCTLKSFTVEKGIYQTSNFRVQPTESIVRFPNITNLCPFGEVFNATRFASVYAWNRKRISNCVADYSVLYNSASFSTFKCYGVSPTKLNDLCFTNVYADSFVIRGDEVRQIAPGQTGKIADYNYKLPDDFTGCVIAWNSNNLDSKVGGNYNYLYRLFRKSNLKPFERDISTEIYQAGSTPCNGVEGFNCYFPLQSYGFQPTNGVGYQPYRVVVLSFELLHAPATVCGPKKSTNLVKNKCVNFNFNGLTGTGVLTESNKKFLPFQQFGRDIADTTDAVRDPQTLEILDITPCSFGGVSVITPGTNTSNQVAVLYQDVNCTEVPVAIHADQLTPTWRVYSTGSNVFQTRAGCLIGAEHVNNSYECDIPIGAGICASYQTQTNSPRRARSVASQSIIAYTMSLGAENSVAYSNNSIAIPTNFTISVTTEILPVSMTKTSVDCTMYICGDSTECSNLLLQYGSFCTQLNRALTGIAVEQDKNTQEVFAQVKQIYKTPPIKDFGGFNFSQILPDPSKPSKRSFIEDLLFNKVTLADAGFIKQYGDCLGDIAARDLICAQKFNGLTVLPPLLTDEMIAQYTSALLAGTITSGWTFGAGAALQIPFAMQMAYRFNGIGVTQNVLYENQKLIANQFNSAIGKIQDSLSSTASALGKLQDVVNQNAQALNTLVKQLSSNFGAISSVLNDILSRLDPPEAEVQIDRLITGRLQSLQTYVTQQLIRAAEIRASANLAATKMSECVLGQSKRVDFCGKGYHLMSFPQSAPHGVVFLHVTYVPAQEKNFTTAPAICHDGKAHFPREGVFVSNGTHWFVTQRNFYEPQIITTDNTFVSGNCDVVIGIVNNTVYDPLQPELDSFKEELDKYFKNHTSPDVDLGDISGINASVVNIQKEIDRLNEVAKNLNESLIDLQELGKYEQYIKWPWYIWLGFIAGLIAIVMVTIMLCCMTSCCSCLKGCCSCGSCCKFDEDDSEPVLKGVKLHYT

SEQ ID NO: 6 - RNA, 3995 nt, Artificial Sequence
  Synthetic
gggaaauaagagagaaaagaagaguaagaagaaauauaagaccccggcgccgccaccauguucguguuccuggugcugcugccccuggugagcagccagugcgugaaccugaccaccaggacccagcugccgccugccuacaccaacagcuucacccgcgguguguacuaccccgacaagguguucagguccagcgugcugcacagcacccaggaccuguuccuccccuucuucagcaacgugaccugguuccacgccauccacgugagcggcaccaacggcaccaagcgguucgacaaccccgugcugcccuucaacgacggcguguacuucgccagcaccgagaagagcaacaucauccggggcuggaucuucggcaccacacucgacagcaagacccagagccugcugaucgugaacaacgccaccaacguggugaucaaggugugcgaauuccaguucugcaacgaccccuuccugggcguguacuaccacaagaacaacaagagcuggauggagagcgaguuccgcguguacagcagcgccaacaacugcaccuucgaguacgugagccagcccuuccugauggaccuggagggcaagcagggcaauuucaagaaccugagggaguucguguucaagaacaucgacggcuacuucaagaucuacagcaagcacacgcccaucaaccuggugcgggacuugccccagggcuucagcgcccuggagcccuuaguggaccugccuaucggcaucaacaucacccgguuccagacccugcuggcccugcaccggagcuaccugacucccggcgacagcagcuccggguggacugccggugcugccgccuacuacgugggguaccugcagccccggaccuuccugcugaaguacaacgagaacggcaccaucaccgacgccguggacugcgcccuggauccacugagcgagaccaagugcacccugaagagcuucaccguggagaagggcaucuaccagaccagcaacuuccgggugcagcccaccgagagcaucgugagguuccccaacaucaccaaccugugcccuuucggcgagguguucaacgccacccgcuucgccuccguguacgccuggaacaggaagaggaucagcaacugcguggccgacuacagcgugcuguacaacagcgccagcuucuccaccuucaagugcuacggcgugagcccaaccaagcugaacgaccugugcuuuaccaacguguacgccgauagcuucgugauccgcggcgacgaagugcggcagaucgcuccugggcagaccggaaagaucgccgacuacaacuacaagcugcccgacgacuucaccgggugcgugaucgcuuggaacagcaacaaccuggacagcaaggugggcggcaacuacaacuaccuguaccggcuguuccggaagagcaaccugaagcccuucgagcgcgacaucuccaccgagaucuaccaggccggcuccacacccugcaacggcguggagggcuucaacugcuacuuuccccugcaguccuacggcuuccagcccaccaacggcgugggcuaccagccauaccgcgugguggugcuguccuucgagcugcugcacgcucccgccaccguuugcggccccaagaaguccaccaaccuggugaagaacaagugcgugaacuucaacuucaacggucucacgggcaccggggugcugaccgagagcaacaagaaguuccugcccuuucagcaguucggcagggacaucgccgacaccacagacgccgugcgggauccccagacccuggagauccuggacaucaccccgugcagcuucggcggcgugagcgugaucacgcccggcaccaacaccagcaaccagguggccgugcuguaccaggacgugaacugcaccgaggugcccguggccauccacgccgaccagcugacucccaccuggcgcguguauagcaccggcagcaacguguuccagacacgggccggcugccugaucggcgccgagcacgugaacaacuccuacgagugcgacauccccaucggcgcuggcaucugcgccagcuaccagacccagaccaacagccccagacgggccagguccguggcuucccagagcaucaucgccuacaccaugucccugggcgccgagaacagcguggccuacagcaacaacuccaucgccauccccaccaacuucaccaucagcgugaccaccgagauccugcccgugagcaugaccaagaccuccguggacugcaccauguacaucugcggcgacagcaccgagugcagcaaccugcugcugcaguacggcagcuucugcacccagcugaacagggcccugaccggcaucgccguggagcaggacaagaacacccaggagguguucgcccaggugaagcagaucuacaagacuccaccuaucaaggacuucggcggguucaacuucagccagauccuccccgaccccuccaagcccagcaagcggagcuucaucgaggaccugcuguucaacaaggugacccuggcugacgccggcuuuaucaagcaguacggcgacugccuuggcgacaucgccgccagggaccugaucugcgcccagaaguucaacggccugaccgugcugccgccacugcugaccgacgagaugaucgcccaguacaccucugcccugcuggccgguaccaucaccuccggcuggacauuuggugcuggcgcugcgcugcagauccccuucgccaugcagauggccuaccgcuucaacggcaucggggugacccagaacgugcuguacgagaaccagaagcugaucgccaaccaguucaacagcgccaucggcaagauccaggacagccugagcagcaccgccagcgcucugggcaagcugcaggacguggugaaccagaacgcccaggcccugaacacccuggugaagcagcuguccagcaacuucggcgccaucagcuccgugcugaacgacauccugagccggcuggauccaccagaggccgaggugcagaucgaccgucugaucaccggucggcugcagagccugcagaccuacgugacccagcagcugauccgcgccgccgaaauccgcgccuccgccaaccuggccgccaccaagauguccgagugcgugcugggccagagcaagcggguggacuucugcggcaagggcuaccaccugaugagcuucccacagagcgcuccccacgggguaguguuccugcacgugaccuacgugcccgcccaggagaagaacuucaccacugcacccgccaucugccacgacggcaaggcccacuucccucgggagggcguguucgugagcaacggcacccacugguucgugacccagaggaacuucuacgagccccagaucaucaccaccgacaacaccuucguguccggcaacugcgacguggugaucggcauagugaacaacaccguguacgacccacugcagcccgagcuggacagcuucaaggaggagcuggacaaguacuucaagaaccacaccagcccagacguggaccugggcgacaucuccggcaucaacgccuccguggugaacauccagaaggagaucgaccggcugaacgagguggccaagaaccugaacgagagccugaucgaccugcaggagcuggggaaguacgagcaguacaucaaguggccuugguacaucuggcugggcuucaucgccggccugaucgccaucgugauggugaccaucaugcugugcugcaugaccagcugcugcagcugccugaagggcuguugcagcugcggcagcugcugcaaguucgacgaggacgacagcgagcccgugcugaagggcgugaagcugcacuacaccugauaauaggcuggagccucgguggccuagcuucuugccccuugggccuccccccagccccuccuccccuuccugcacccguacccccguggucuuugaauaaagucugagugggcggc

SEQ ID NO: 7 - RNA, 3819 nt, Artificial Sequence
  Synthetic
auguucguguuccuggugcugcugccccuggugagcagccagugcgugaaccugaccaccaggacccagcugccgccugccuacaccaacagcuucacccgcgguguguacuaccccgacaagguguucagguccagcgugcugcacagcacccaggaccuguuccuccccuucuucagcaacgugaccugguuccacgccauccacgugagcggcaccaacggcaccaagcgguucgacaaccccgugcugcccuucaacgacggcguguacuucgccagcaccgagaagagcaacaucauccggggcuggaucuucggcaccacacucgacagcaagacccagagccugcugaucgugaacaacgccaccaacguggugaucaaggugugcgaauuccaguucugcaacgaccccuuccugggcguguacuaccacaagaacaacaagagcuggauggagagcgaguuccgcguguacagcagcgccaacaacugcaccuucgaguacgugagccagcccuuccugauggaccuggagggcaagcagggcaauuucaagaaccugagggaguucguguucaagaacaucgacggcuacuucaagaucuacagcaagcacacgcccaucaaccuggugcgggacuugccccagggcuucagcgcccuggagcccuuaguggaccugccuaucggcaucaacaucacccgguuccagacccugcuggcccugcaccggagcuaccugacucccggcgacagcagcuccggguggacugccggugcugccgccuacuacgugggguaccugcagccccggaccuuccugcugaaguacaacgagaacggcaccaucaccgacgccguggacugcgcccuggauccacugagcgagaccaagugcacccugaagagcuucaccguggagaagggcaucuaccagaccagcaacuuccgggugcagcccaccgagagcaucgugagguuccccaacaucaccaaccugugcccuuucggcgagguguucaacgccacccgcuucgccuccguguacgccuggaacaggaagaggaucagcaacugcguggccgacuacagcgugcuguacaacagcgccagcuucuccaccuucaagugcuacggcgugagcccaaccaagcugaacgaccugugcuuuaccaacguguacgccgauagcuucgugauccgcggcgacgaagugcggcagaucgcuccugggcagaccggaaagaucgccgacuacaacuacaagcugcccgacgacuucaccgggugcgugaucgcuuggaacagcaacaaccuggacagcaaggugggcggcaacuacaacuaccuguaccggcuguuccggaagagcaaccugaagcccuucgagcgcgacaucuccaccgagaucuaccaggccggcuccacacccugcaacggcguggagggcuucaacugcuacuuuccccugcaguccuacggcuuccagcccaccaacggcgugggcuaccagccauaccgcgugguggugcuguccuucgagcugcugcacgcucccgccaccguuugcggccccaagaaguccaccaaccuggugaagaacaagugcgugaacuucaacuucaacggucucacgggcaccggggugcugaccgagagcaacaagaaguuccugcccuuucagcaguucggcagggacaucgccgacaccacagacgccgugcgggauccccagacccuggagauccuggacaucaccccgugcagcuucggcggcgugagcgugaucacgcccggcaccaacaccagcaaccagguggccgugcuguaccaggacgugaacugcaccgaggugcccguggccauccacgccgaccagcugacucccaccuggcgcguguauagcaccggcagcaacguguuccagacacgggccggcugccugaucggcgccgagcacgugaacaacuccuacgagugcgacauccccaucggcgcuggcaucugcgccagcuaccagacccagaccaacagccccagacgggccagguccguggcuucccagagcaucaucgccuacaccaugucccugggcgccgagaacagcguggccuacagcaacaacuccaucgccauccccaccaacuucaccaucagcgugaccaccgagauccugcccgugagcaugaccaagaccuccguggacugcaccauguacaucugcggcgacagcaccgagugcagcaaccugcugcugcaguacggcagcuucugcacccagcugaacagggcccugaccggcaucgccguggagcaggacaagaacacccaggagguguucgcccaggugaagcagaucuacaagacuccaccuaucaaggacuucggcggguucaacuucagccagauccuccccgaccccuccaagcccagcaagcggagcuucaucgaggaccugcuguucaacaaggugacccuggcugacgccggcuuuaucaagcaguacggcgacugccuuggcgacaucgccgccagggaccugaucugcgcccagaaguucaacggccugaccgugcugccgccacugcugaccgacgagaugaucgcccaguacaccucugcccugcuggccgguaccaucaccuccggcuggacauuuggugcuggcgcugcgcugcagauccccuucgccaugcagauggccuaccgcuucaacggcaucggggugacccagaacgugcuguacgagaaccagaagcugaucgccaaccaguucaacagcgccaucggcaagauccaggacagccugagcagcaccgccagcgcucugggcaagcugcaggacguggugaaccagaacgcccaggcccugaacacccuggugaagcagcuguccagcaacuucggcgccaucagcuccgugcugaacgacauccugagccggcuggauccaccagaggccgaggugcagaucgaccgucugaucaccggucggcugcagagccugcagaccuacgugacccagcagcugauccgcgccgccgaaauccgcgccuccgccaaccuggccgccaccaagauguccgagugcgugcugggccagagcaagcggguggacuucugcggcaagggcuaccaccugaugagcuucccacagagcgcuccccacgggguaguguuccugcacgugaccuacgugcccgcccaggagaagaacuucaccacugcacccgccaucugccacgacggcaaggcccacuucccucgggagggcguguucgugagcaacggcacccacugguucgugacccagaggaacuucuacgagccccagaucaucaccaccgacaacaccuucguguccggcaacugcgacguggugaucggcauagugaacaacaccguguacgacccacugcagcccgagcuggacagcuucaaggaggagcuggacaaguacuucaagaaccacaccagcccagacguggaccugggcgacaucuccggcaucaacgccuccguggugaacauccagaaggagaucgaccggcugaacgagguggccaagaaccugaacgagagccugaucgaccugcaggagcuggggaaguacgagcaguacaucaaguggccuugguacaucuggcugggcuucaucgccggccugaucgccaucgugauggugaccaucaugcugugcugcaugaccagcugcugcagcugccugaagggcuguugcagcugcggcagcugcugcaaguucgacgaggacgacagcgagcccgugcugaagggcgugaagcugcacuacacc

SEQ ID NO: 8 - protein, 1273 aa, Artificial Sequence; identical to SEQ ID NO: 5
  Synthetic

SEQ ID NO: 9 - RNA, 3887 nt, Artificial Sequence
  Synthetic
gggaaauaagagagaaaagaagaguaagaagaaauauaagaccccggcgccgccaccauguucguguuccuggugcugcugccccuggugagcagccagugcgugaaccugaccacccggacccagcugccaccagccuacaccaacagcuucacccggggcgucuacuaccccgacaagguguuccggagcagcguccugcacagcacccaggaccuguuccugcccuucuucagcaacgugaccugguuccacgccauccacgugagcggcaccaacggcaccaagcgguucgacaaccccgugcugcccuucaacgacggcguguacuucgccagcaccgagaagagcaacaucauccggggcuggaucuucggcaccacccuggacagcaagacccagagccugcugaucgugaauaacgccaccaacguggugaucaaggugugcgaguuccaguucugcaacgaccccuuccugggcguguacuaccacaagaacaacaagagcuggauggagagcgaguuccggguguacagcagcgccaacaacugcaccuucgaguacgugagccagcccuuccugauggaccuggagggcaagcagggcaacuucaagaaccugcgggaguucguguucaagaacaucgacggcuacuucaagaucuacagcaagcacaccccaaucaaccuggugcgggaucugccccagggcuucucagcccuggagccccugguggaccugcccaucggcaucaacaucacccgguuccagacccugcuggcccugcaccggagcuaccugaccccaggcgacagcagcagcggguggacagcaggcgcggcugcuuacuacgugggcuaccugcagccccggaccuuccugcugaaguacaacgagaacggcaccaucaccgacgccguggacugcgcccuggacccucugagcgagaccaagugcacccugaagagcuucaccguggagaagggcaucuaccagaccagcaacuuccgggugcagcccaccgagagcaucgugcgguuccccaacaucaccaaccugugccccuucggcgagguguucaacgccacccgguucgccagcguguacgccuggaaccggaagcggaucagcaacugcguggccgacuacagcgugcuguacaacagcgccagcuucagcaccuucaagugcuacggcgugagccccaccaagcugaacgaccugugcuucaccaacguguacgccgacagcuucgugauccguggcgacgaggugcggcagaucgcacccggccagacaggcaagaucgccgacuacaacuacaagcugcccgacgacuucaccggcugcgugaucgccuggaacagcaacaaccucgacagcaaggugggcggcaacuacaacuaccuguaccggcuguuccggaagagcaaccugaagcccuucgagcgggacaucagcaccgagaucuaccaagccggcuccaccccuugcaacggcguggagggcuucaacugcuacuucccucugcagagcuacggcuuccagcccaccaacggcgugggcuaccagcccuaccgggugguggugcugagcuucgagcugcugcacgccccagccaccguguguggccccaagaagagcaccaaccuggugaagaacaagugcgugaacuucaacuucaacggccuuaccggcaccggcgugcugaccgagagcaacaagaaauuccugcccuuucagcaguucggccgggacaucgccgacaccaccgacgcugugcgggauccccagacccuggagauccuggacaucaccccuugcagcuucggcggcgugagcgugaucaccccaggcaccaacaccagcaaccagguggccgugcuguaccaggacgugaacugcaccgaggugcccguggccauccacgccgaccagcugacacccaccuggcgggucuacagcaccggcagcaacguguuccagacccgggccgguugccugaucggcgccgagcacgugaacaacagcuacgagugcgacauccccaucggcgccggcaucugugccagcuaccagacccagaccaauucacccggcagcggcggcagcguggccagccagagcaucaucgccuacaccaugagccugggcgccgagaacagcguggccuacagcaacaacagcaucgccauccccaccaacuucaccaucagcgugaccaccgagauucugcccgugagcaugaccaagaccagcguggacugcaccauguacaucugcggcgacagcaccgagugcagcaaccugcugcugcaguacggcagcuucugcacccagcugaaccgggcccugaccggcaucgccguggagcaggacaagaacacccaggagguguucgcccaggugaagcagaucuacaagaccccucccaucaaggacuucggcggcuucaacuucagccagauccugcccgaccccagcaagcccagcaagcggagcuucaucgaggaccugcuguucaacaaggugacccuagccgacgccggcuucaucaagcaguacggcgacugccucggcgacauagccgcccgggaccugaucugcgcccagaaguucaacggccugaccgugcugccuccccugcugaccgacgagaugaucgcccaguacaccagcgcccuguuagccggaaccaucaccagcggcuggacuuucggcgcuggagccgcucugcagauccccuucgccaugcagauggccuaccgguucaacggcaucggcgugacccagaacgugcuguacgagaaccagaagcugaucgccaaccaguucaacagcgccaucggcaagauccaggacagccugagcagcaccgcuagcgcccugggcaagcugcaggacguggugaaccagaacgcccaggcccugaacacccuggugaagcagcugagcagcaacuucggcgccaucagcagcgugcugaacgacauccugagccggcuggacccucccgaggccgaggugcagaucgaccggcugaucacuggccggcugcagagccugcagaccuacgugacccagcagcugauccgggccgccgagauucgggccagcgccaaccuggccgccaccaagaugagcgagugcgugcugggccagagcaagcggguggacuucugcggcaagggcuaccaccugaugagcuuuccccagagcgcaccccacggagugguguuccugcacgugaccuacgugcccgcccaggagaagaacuucaccaccgccccagccaucugccacgacggcaaggcccacuuuccccgggagggcguguucgugagcaacggcacccacugguucgugacccagcggaacuucuacgagccccagaucaucaccaccgacaacaccuucgugagcggcaacugcgacguggugaucggcaucgugaacaacaccguguacgauccccugcagcccgagcuggacagcuucaaggaggagcuggacaaguacuucaagaaucacaccagccccgacguggaccugggcgacaucagcggcaucaacgccagcguggugaacauccagaaggagaucgaucggcugaacgagguggccaagaaccugaacgagagccugaucgaccugcaggagcugggcaaguacgagcagggcagcggcuacauccccgaggccccuagagacggccaggccuacgugcggaaggacggcgagugggugcugcugagcaccuuccugugauaauaggcuggagccucgguggccuagcuucuugccccuugggccuccccccagccccuccuccccuuccugcacccguacccccguggucuuugaauaaagucugagugggcggc

SEQ ID NO: 10 - RNA, 3711 nt, Artificial Sequence
  Synthetic
auguucguguuccuggugcugcugccccuggugagcagccagugcgugaaccugaccacccggacccagcugccaccagccuacaccaacagcuucacccggggcgucuacuaccccgacaagguguuccggagcagcguccugcacagcacccaggaccuguuccugcccuucuucagcaacgugaccugguuccacgccauccacgugagcggcaccaacggcaccaagcgguucgacaaccccgugcugcccuucaacgacggcguguacuucgccagcaccgagaagagcaacaucauccggggcuggaucuucggcaccacccuggacagcaagacccagagccugcugaucgugaauaacgccaccaacguggugaucaaggugugcgaguuccaguucugcaacgaccccuuccugggcguguacuaccacaagaacaacaagagcuggauggagagcgaguuccggguguacagcagcgccaacaacugcaccuucgaguacgugagccagcccuuccugauggaccuggagggcaagcagggcaacuucaagaaccugcgggaguucguguucaagaacaucgacggcuacuucaagaucuacagcaagcacaccccaaucaaccuggugcgggaucugccccagggcuucucagcccuggagccccugguggaccugcccaucggcaucaacaucacccgguuccagacccugcuggcccugcaccggagcuaccugaccccaggcgacagcagcagcggguggacagcaggcgcggcugcuuacuacgugggcuaccugcagccccggaccuuccugcugaaguacaacgagaacggcaccaucaccgacgccguggacugcgcccuggacccucugagcgagaccaagugcacccugaagagcuucaccguggagaagggcaucuaccagaccagcaacuuccgggugcagcccaccgagagcaucgugcgguuccccaacaucaccaaccugugccccuucggcgagguguucaacgccacccgguucgccagcguguacgccuggaaccggaagcggaucagcaacugcguggccgacuacagcgugcuguacaacagcgccagcuucagcaccuucaagugcuacggcgugagccccaccaagcugaacgaccugugcuucaccaacguguacgccgacagcuucgugauccguggcgacgaggugcggcagaucgcacccggccagacaggcaagaucgccgacuacaacuacaagcugcccgacgacuucaccggcugcgugaucgccuggaacagcaacaaccucgacagcaaggugggcggcaacuacaacuaccuguaccggcuguuccggaagagcaaccugaagcccuucgagcgggacaucagcaccgagaucuaccaagccggcuccaccccuugcaacggcguggagggcuucaacugcuacuucccucugcagagcuacggcuuccagcccaccaacggcgugggcuaccagcccuaccgggugguggugcugagcuucgagcugcugcacgccccagccaccguguguggccccaagaagagcaccaaccuggugaagaacaagugcgugaacuucaacuucaacggccuuaccggcaccggcgugcugaccgagagcaacaagaaauuccugcccuuucagcaguucggccgggacaucgccgacaccaccgacgcugugcgggauccccagacccuggagauccuggacaucaccccuugcagcuucggcggcgugagcgugaucaccccaggcaccaacaccagcaaccagguggccgugcuguaccaggacgugaacugcaccgaggugcccguggccauccacgccgaccagcugacacccaccuggcgggucuacagcaccggcagcaacguguuccagacccgggccgguugccugaucggcgccgagcacgugaacaacagcuacgagugcgacauccccaucggcgccggcaucugugccagcuaccagacccagaccaauucacccggcagcggcggcagcguggccagccagagcaucaucgccuacaccaugagccugggcgccgagaacagcguggccuacagcaacaacagcaucgccauccccaccaacuucaccaucagcgugaccaccgagauucugcccgugagcaugaccaagaccagcguggacugcaccauguacaucugcggcgacagcaccgagugcagcaaccugcugcugcaguacggcagcuucugcacccagcugaaccgggcccugaccggcaucgccguggagcaggacaagaacacccaggagguguucgcccaggugaagcagaucuacaagaccccucccaucaaggacuucggcggcuucaacuucagccagauccugcccgaccccagcaagcccagcaagcggagcuucaucgaggaccugcuguucaacaaggugacccuagccgacgccggcuucaucaagcaguacggcgacugccucggcgacauagccgcccgggaccugaucugcgcccagaaguucaacggccugaccgugcugccuccccugcugaccgacgagaugaucgcccaguacaccagcgcccuguuagccggaaccaucaccagcggcuggacuuucggcgcuggagccgcucugcagauccccuucgccaugcagauggccuaccgguucaacggcaucggcgugacccagaacgugcuguacgagaaccagaagcugaucgccaaccaguucaacagcgccaucggcaagauccaggacagccugagcagcaccgcuagcgcccugggcaagcugcaggacguggugaaccagaacgcccaggcccugaacacccuggugaagcagcugagcagcaacuucggcgccaucagcagcgugcugaacgacauccugagccggcuggacccucccgaggccgaggugcagaucgaccggcugaucacuggccggcugcagagccugcagaccuacgugacccagcagcugauccgggccgccgagauucgggccagcgccaaccuggccgccaccaagaugagcgagugcgugcugggccagagcaagcggguggacuucugcggcaagggcuaccaccugaugagcuuuccccagagcgcaccccacggagugguguuccugcacgugaccuacgugcccgcccaggagaagaacuucaccaccgccccagccaucugccacgacggcaaggcccacuuuccccgggagggcguguucgugagcaacggcacccacugguucgugacccagcggaacuucuacgagccccagaucaucaccaccgacaacaccuucgugagcggcaacugcgacguggugaucggcaucgugaacaacaccguguacgauccccugcagcccgagcuggacagcuucaaggaggagcuggacaaguacuucaagaaucacaccagccccgacguggaccugggcgacaucagcggcaucaacgccagcguggugaacauccagaaggagaucgaucggcugaacgagguggccaagaaccugaacgagagccugaucgaccugcaggagcugggcaaguacgagcagggcagcggcuacauccccgaggccccuagagacggccaggccuacgugcggaaggacggcgagugggugcugcugagcaccuuccug

SEQ ID NO: 11 - protein, 1237 aa, Artificial Sequence
  Synthetic
MFVFLVLLPLVSSQCVNLTTRTQLPPAYTNSFTRGVYYPDKVFRSSVLHSTQDLFLPFFSNVTWFHAIHVSGTNGTKRFDNPVLPFNDGVYFASTEKSNIIRGWIFGTTLDSKTQSLLIVNNATNVVIKVCEFQFCNDPFLGVYYHKNNKSWMESEFRVYSSANNCTFEYVSQPFLMDLEGKQGNFKNLREFVFKNIDGYFKIYSKHTPINLVRDLPQGFSALEPLVDLPIGINITRFQTLLALHRSYLTPGDSSSGWTAGAAAYYVGYLQPRTFLLKYNENGTITDAVDCALDPLSETKCTLKSFTVEKGIYQTSNFRVQPTESIVRFPNITNLCPFGEVFNATRFASVYAWNRKRISNCVADYSVLYNSASFSTFKCYGVSPTKLNDLCFTNVYADSFVIRGDEVRQIAPGQTGKIADYNYKLPDDFTGCVIAWNSNNLDSKVGGNYNYLYRLFRKSNLKPFERDISTEIYQAGSTPCNGVEGFNCYFPLQSYGFQPTNGVGYQPYRVVVLSFELLHAPATVCGPKKSTNLVKNKCVNFNFNGLTGTGVLTESNKKFLPFQQFGRDIADTTDAVRDPQTLEILDITPCSFGGVSVITPGTNTSNQVAVLYQDVNCTEVPVAIHADQLTPTWRVYSTGSNVFQTRAGCLIGAEHVNNSYECDIPIGAGICASYQTQTNSPGSGGSVASQSIIAYTMSLGAENSVAYSNNSIAIPTNFTISVTTEILPVSMTKTSVDCTMYICGDSTECSNLLLQYGSFCTQLNRALTGIAVEQDKNTQEVFAQVKQIYKTPPIKDFGGFNFSQILPDPSKPSKRSFIEDLLFNKVTLADAGFIKQYGDCLGDIAARDLICAQKFNGLTVLPPLLTDEMIAQYTSALLAGTITSGWTFGAGAALQIPFAMQMAYRFNGIGVTQNVLYENQKLIANQFNSAIGKIQDSLSSTASALGKLQDVVNQNAQALNTLVKQLSSNFGAISSVLNDILSRLDPPEAEVQIDRLITGRLQSLQTYVTQQLIRAAEIRASANLAATKMSECVLGQSKRVDFCGKGYHLMSFPQSAPHGVVFLHVTYVPAQEKNFTTAPAICHDGKAHFPREGVFVSNGTHWFVTQRNFYEPQIITTDNTFVSGNCDVVIGIVNNTVYDPLQPELDSFKEELDKYFKNHTSPDVDLGDISGINASVVNIQKEIDRLNEVAKNLNESLIDLQELGKYEQGSGYIPEAPRDGQAYVRKDGEWVLLSTFL

SEQ ID NO: 12 - RNA, 3887 nt, Artificial Sequence
  Synthetic
gggaaauaagagagaaaagaagaguaagaagaaauauaagaccccggcgccgccaccauguucguguuccuggugcugcugccccuggugagcagccagugcgugaaccugaccacccggacccagcugccaccagccuacaccaacagcuucacccggggcgucuacuaccccgacaagguguuccggagcagcguccugcacagcacccaggaccuguuccugcccuucuucagcaacgugaccugguuccacgccauccacgugagcggcaccaacggcaccaagcgguucgacaaccccgugcugcccuucaacgacggcguguacuucgccagcaccgagaagagcaacaucauccggggcuggaucuucggcaccacccuggacagcaagacccagagccugcugaucgugaauaacgccaccaacguggugaucaaggugugcgaguuccaguucugcaacgaccccuuccugggcguguacuaccacaagaacaacaagagcuggauggagagcgaguuccggguguacagcagcgccaacaacugcaccuucgaguacgugagccagcccuuccugauggaccuggagggcaagcagggcaacuucaagaaccugcgggaguucguguucaagaacaucgacggcuacuucaagaucuacagcaagcacaccccaaucaaccuggugcgggaucugccccagggcuucucagcccuggagccccugguggaccugcccaucggcaucaacaucacccgguuccagacccugcuggcccugcaccggagcuaccugaccccaggcgacagcagcagcggguggacagcaggcgcggcugcuuacuacgugggcuaccugcagccccggaccuuccugcugaaguacaacgagaacggcaccaucaccgacgccguggacugcgcccuggacccucugagcgagaccaagugcacccugaagagcuucaccguggagaagggcaucuaccagaccagcaacuuccgggugcagcccaccgagagcaucgugcgguuccccaacaucaccaaccugugccccuucggcgagguguucaacgccacccgguucgccagcguguacgccuggaaccggaagcggaucagcaacugcguggccgacuacagcgugcuguacaacagcgccagcuucagcaccuucaagugcuacggcgugagccccaccaagcugaacgaccugugcuucaccaacguguacgccgacagcuucgugauccguggcgacgaggugcggcagaucgcacccggccagacaggcaagaucgccgacuacaacuacaagcugcccgacgacuucaccggcugcgugaucgccuggaacagcaacaaccucgacagcaaggugggcggcaacuacaacuaccuguaccggcuguuccggaagagcaaccugaagcccuucgagcgggacaucagcaccgagaucuaccaagccggcuccaccccuugcaacggcguggagggcuucaacugcuacuucccucugcagagcuacggcuuccagcccaccaacggcgugggcuaccagcccuaccgggugguggugcugagcuucgagcugcugcacgccccagccaccguguguggccccaagaagagcaccaaccuggugaagaacaagugcgugaacuucaacuucaacggccuuaccggcaccggcgugcugaccgagagcaacaagaaauuccugcccuuucagcaguucggccgggacaucgccgacaccaccgacgcugugcgggauccccagacccuggagauccuggacaucaccccuugcagcuucggcggcgugagcgugaucaccccaggcaccaacaccagcaaccagguggccgugcuguaccaggacgugaacugcaccgaggugcccguggccauccacgccgaccagcugacacccaccuggcgggucuacagcaccggcagcaacguguuccagacccgggccgguugccugaucggcgccgagcacgugaacaacagcuacgagugcgacauccccaucggcgccggcaucugugccagcuaccagacccagaccaauucaccccggagggcaaggagcguggccagccagagcaucaucgccuacaccaugagccugggcgccgagaacagcguggccuacagcaacaacagcaucgccauccccaccaacuucaccaucagcgugaccaccgagauucugcccgugagcaugaccaagaccagcguggacugcaccauguacaucugcggcgacagcaccgagugcagcaaccugcugcugcaguacggcagcuucugcacccagcugaaccgggcccugaccggcaucgccguggagcaggacaagaacacccaggagguguucgcccaggugaagcagaucuacaagaccccucccaucaaggacuucggcggcuucaacuucagccagauccugcccgaccccagcaagcccagcaagcggagcuucaucgaggaccugcuguucaacaaggugacccuagccgacgccggcuucaucaagcaguacggcgacugccucggcgacauagccgcccgggaccugaucugcgcccagaaguucaacggccugaccgugcugccuccccugcugaccgacgagaugaucgcccaguacaccagcgcccuguuagccggaaccaucaccagcggcuggacuuucggcgcuggagccgcucugcagauccccuucgccaugcagauggccuaccgguucaacggcaucggcgugacccagaacgugcuguacgagaaccagaagcugaucgccaaccaguucaacagcgccaucggcaagauccaggacagccugagcagcaccgcuagcgcccugggcaagcugcaggacguggugaaccagaacgcccaggcccugaacacccuggugaagcagcugagcagcaacuucggcgccaucagcagcgugcugaacgacauccugagccggcuggacccucccgaggccgaggugcagaucgaccggcugaucacuggccggcugcagagccugcagaccuacgugacccagcagcugauccgggccgccgagauucgggccagcgccaaccuggccgccaccaagaugagcgagugcgugcugggccagagcaagcggguggacuucugcggcaagggcuaccaccugaugagcuuuccccagagcgcaccccacggagugguguuccugcacgugaccuacgugcccgcccaggagaagaacuucaccaccgccccagccaucugccacgacggcaaggcccacuuuccccgggagggcguguucgugagcaacggcacccacugguucgugacccagcggaacuucuacgagccccagaucaucaccaccgacaacaccuucgugagcggcaacugcgacguggugaucggcaucgugaacaacaccguguacgauccccugcagcccgagcuggacagcuucaaggaggagcuggacaaguacuucaagaaucacaccagccccgacguggaccugggcgacaucagcggcaucaacgccagcguggugaacauccagaaggagaucgaucggcugaacgagguggccaagaaccugaacgagagccugaucgaccugcaggagcugggcaaguacgagcagggcagcggcuacauccccgaggccccuagagacggccaggccuacgugcggaaggacggcgagugggugcugcugagcaccuuccugugauaauaggcuggagccucgguggccuagcuucuugccccuugggccuccccccagccccuccuccccuuccugcacccguacccccguggucuuugaauaaagucugagugggcggc

SEQ ID NO: 13 - RNA, 3711 nt, Artificial Sequence
  Synthetic
auguucguguuccuggugcugcugccccuggugagcagccagugcgugaaccugaccacccggacccagcugccaccagccuacaccaacagcuucacccggggcgucuacuaccccgacaagguguuccggagcagcguccugcacagcacccaggaccuguuccugcccuucuucagcaacgugaccugguuccacgccauccacgugagcggcaccaacggcaccaagcgguucgacaaccccgugcugcccuucaacgacggcguguacuucgccagcaccgagaagagcaacaucauccggggcuggaucuucggcaccacccuggacagcaagacccagagccugcugaucgugaauaacgccaccaacguggugaucaaggugugcgaguuccaguucugcaacgaccccuuccugggcguguacuaccacaagaacaacaagagcuggauggagagcgaguuccggguguacagcagcgccaacaacugcaccuucgaguacgugagccagcccuuccugauggaccuggagggcaagcagggcaacuucaagaaccugcgggaguucguguucaagaacaucgacggcuacuucaagaucuacagcaagcacaccccaaucaaccuggugcgggaucugccccagggcuucucagcccuggagccccugguggaccugcccaucggcaucaacaucacccgguuccagacccugcuggcccugcaccggagcuaccugaccccaggcgacagcagcagcggguggacagcaggcgcggcugcuuacuacgugggcuaccugcagccccggaccuuccugcugaaguacaacgagaacggcaccaucaccgacgccguggacugcgcccuggacccucugagcgagaccaagugcacccugaagagcuucaccguggagaagggcaucuaccagaccagcaacuuccgggugcagcccaccgagagcaucgugcgguuccccaacaucaccaaccugugccccuucggcgagguguucaacgccacccgguucgccagcguguacgccuggaaccggaagcggaucagcaacugcguggccgacuacagcgugcuguacaacagcgccagcuucagcaccuucaagugcuacggcgugagccccaccaagcugaacgaccugugcuucaccaacguguacgccgacagcuucgugauccguggcgacgaggugcggcagaucgcacccggccagacaggcaagaucgccgacuacaacuacaagcugcccgacgacuucaccggcugcgugaucgccuggaacagcaacaaccucgacagcaaggugggcggcaacuacaacuaccuguaccggcuguuccggaagagcaaccugaagcccuucgagcgggacaucagcaccgagaucuaccaagccggcuccaccccuugcaacggcguggagggcuucaacugcuacuucccucugcagagcuacggcuuccagcccaccaacggcgugggcuaccagcccuaccgggugguggugcugagcuucgagcugcugcacgccccagccaccguguguggccccaagaagagcaccaaccuggugaagaacaagugcgugaacuucaacuucaacggccuuaccggcaccggcgugcugaccgagagcaacaagaaauuccugcccuuucagcaguucggccgggacaucgccgacaccaccgacgcugugcgggauccccagacccuggagauccuggacaucaccccuugcagcuucggcggcgugagcgugaucaccccaggcaccaacaccagcaaccagguggccgugcuguaccaggacgugaacugcaccgaggugcccguggccauccacgccgaccagcugacacccaccuggcgggucuacagcaccggcagcaacguguuccagacccgggccgguugccugaucggcgccgagcacgugaacaacagcuacgagugcgacauccccaucggcgccggcaucugugccagcuaccagacccagaccaauucaccccggagggcaaggagcguggccagccagagcaucaucgccuacaccaugagccugggcgccgagaacagcguggccuacagcaacaacagcaucgccauccccaccaacuucaccaucagcgugaccaccgagauucugcccgugagcaugaccaagaccagcguggacugcaccauguacaucugcggcgacagcaccgagugcagcaaccugcugcugcaguacggcagcuucugcacccagcugaaccgggcccugaccggcaucgccguggagcaggacaagaacacccaggagguguucgcccaggugaagcagaucuacaagaccccucccaucaaggacuucggcggcuucaacuucagccagauccugcccgaccccagcaagcccagcaagcggagcuucaucgaggaccugcuguucaacaaggugacccuagccgacgccggcuucaucaagcaguacggcgacugccucggcgacauagccgcccgggaccugaucugcgcccagaaguucaacggccugaccgugcugccuccccugcugaccgacgagaugaucgcccaguacaccagcgcccuguuagccggaaccaucaccagcggcuggacuuucggcgcuggagccgcucugcagauccccuucgccaugcagauggccuaccgguucaacggcaucggcgugacccagaacgugcuguacgagaaccagaagcugaucgccaaccaguucaacagcgccaucggcaagauccaggacagccugagcagcaccgcuagcgcccugggcaagcugcaggacguggugaaccagaacgcccaggcccugaacacccuggugaagcagcugagcagcaacuucggcgccaucagcagcgugcugaacgacauccugagccggcuggacccucccgaggccgaggugcagaucgaccggcugaucacuggccggcugcagagccugcagaccuacgugacccagcagcugauccgggccgccgagauucgggccagcgccaaccuggccgccaccaagaugagcgagugcgugcugggccagagcaagcggguggacuucugcggcaagggcuaccaccugaugagcuuuccccagagcgcaccccacggagugguguuccugcacgugaccuacgugcccgcccaggagaagaacuucaccaccgccccagccaucugccacgacggcaaggcccacuuuccccgggagggcguguucgugagcaacggcacccacugguucgugacccagcggaacuucuacgagccccagaucaucaccaccgacaacaccuucgugagcggcaacugcgacguggugaucggcaucgugaacaacaccguguacgauccccugcagcccgagcuggacagcuucaaggaggagcuggacaaguacuucaagaaucacaccagccccgacguggaccugggcgacaucagcggcaucaacgccagcguggugaacauccagaaggagaucgaucggcugaacgagguggccaagaaccugaacgagagccugaucgaccugcaggagcugggcaaguacgagcagggcagcggcuacauccccgaggccccuagagacggccaggccuacgugcggaaggacggcgagugggugcugcugagcaccuuccug

SEQ ID NO: 14 - protein, 1237 aa, Artificial Sequence
  Synthetic
MFVFLVLLPLVSSQCVNLTTRTQLPPAYTNSFTRGVYYPDKVFRSSVLHSTQDLFLPFFSNVTWFHAIHVSGTNGTKRFDNPVLPFNDGVYFASTEKSNIIRGWIFGTTLDSKTQSLLIVNNATNVVIKVCEFQFCNDPFLGVYYHKNNKSWMESEFRVYSSANNCTFEYVSQPFLMDLEGKQGNFKNLREFVFKNIDGYFKIYSKHTPINLVRDLPQGFSALEPLVDLPIGINITRFQTLLALHRSYLTPGDSSSGWTAGAAAYYVGYLQPRTFLLKYNENGTITDAVDCALDPLSETKCTLKSFTVEKGIYQTSNFRVQPTESIVRFPNITNLCPFGEVFNATRFASVYAWNRKRISNCVADYSVLYNSASFSTFKCYGVSPTKLNDLCFTNVYADSFVIRGDEVRQIAPGQTGKIADYNYKLPDDFTGCVIAWNSNNLDSKVGGNYNYLYRLFRKSNLKPFERDISTEIYQAGSTPCNGVEGFNCYFPLQSYGFQPTNGVGYQPYRVVVLSFELLHAPATVCGPKKSTNLVKNKCVNFNFNGLTGTGVLTESNKKFLPFQQFGRDIADTTDAVRDPQTLEILDITPCSFGGVSVITPGTNTSNQVAVLYQDVNCTEVPVAIHADQLTPTWRVYSTGSNVFQTRAGCLIGAEHVNNSYECDIPIGAGICASYQTQTNSPRRARSVASQSIIAYTMSLGAENSVAYSNNSIAIPTNFTISVTTEILPVSMTKTSVDCTMYICGDSTECSNLLLQYGSFCTQLNRALTGIAVEQDKNTQEVFAQVKQIYKTPPIKDFGGFNFSQILPDPSKPSKRSFIEDLLFNKVTLADAGFIKQYGDCLGDIAARDLICAQKFNGLTVLPPLLTDEMIAQYTSALLAGTITSGWTFGAGAALQIPFAMQMAYRFNGIGVTQNVLYENQKLIANQFNSAIGKIQDSLSSTASALGKLQDVVNQNAQALNTLVKQLSSNFGAISSVLNDILSRLDPPEAEVQIDRLITGRLQSLQTYVTQQLIRAAEIRASANLAATKMSECVLGQSKRVDFCGKGYHLMSFPQSAPHGVVFLHVTYVPAQEKNFTTAPAICHDGKAHFPREGVFVSNGTHWFVTQRNFYEPQIITTDNTFVSGNCDVVIGIVNNTVYDPLQPELDSFKEELDKYFKNHTSPDVDLGDISGINASVVNIQKEIDRLNEVAKNLNESLIDLQELGKYEQGSGYIPEAPRDGQAYVRKDGEWVLLSTFL

SEQ ID NO: 15 - RNA, 3995 nt, Artificial Sequence
  Synthetic
gggaaauaagagagaaaagaagaguaagaagaaauauaagaccccggcgccgccaccauguucguguuccuggugcugcugccccuggugagcagccagugcgugaaccugaccacccggacccagcugccaccagccuacaccaacagcuucacccggggcgucuacuaccccgacaagguguuccggagcagcguccugcacagcacccaggaccuguuccugcccuucuucagcaacgugaccugguuccacgccauccacgugagcggcaccaacggcaccaagcgguucgacaaccccgugcugcccuucaacgacggcguguacuucgccagcaccgagaagagcaacaucauccggggcuggaucuucggcaccacccuggacagcaagacccagagccugcugaucgugaauaacgccaccaacguggugaucaaggugugcgaguuccaguucugcaacgaccccuuccugggcguguacuaccacaagaacaacaagagcuggauggagagcgaguuccggguguacagcagcgccaacaacugcaccuucgaguacgugagccagcccuuccugauggaccuggagggcaagcagggcaacuucaagaaccugcgggaguucguguucaagaacaucgacggcuacuucaagaucuacagcaagcacaccccaaucaaccuggugcgggaucugccccagggcuucucagcccuggagccccugguggaccugcccaucggcaucaacaucacccgguuccagacccugcuggcccugcaccggagcuaccugaccccaggcgacagcagcagcggguggacagcaggcgcggcugcuuacuacgugggcuaccugcagccccggaccuuccugcugaaguacaacgagaacggcaccaucaccgacgccguggacugcgcccuggacccucugagcgagaccaagugcacccugaagagcuucaccguggagaagggcaucuaccagaccagcaacuuccgggugcagcccaccgagagcaucgugcgguuccccaacaucaccaaccugugccccuucggcgagguguucaacgccacccgguucgccagcguguacgccuggaaccggaagcggaucagcaacugcguggccgacuacagcgugcuguacaacagcgccagcuucagcaccuucaagugcuacggcgugagccccaccaagcugaacgaccugugcuucaccaacguguacgccgacagcuucgugauccguggcgacgaggugcggcagaucgcacccggccagacaggcaagaucgccgacuacaacuacaagcugcccgacgacuucaccggcugcgugaucgccuggaacagcaacaaccucgacagcaaggugggcggcaacuacaacuaccuguaccggcuguuccggaagagcaaccugaagcccuucgagcgggacaucagcaccgagaucuaccaagccggcuccaccccuugcaacggcguggagggcuucaacugcuacuucccucugcagagcuacggcuuccagcccaccaacggcgugggcuaccagcccuaccgggugguggugcugagcuucgagcugcugcacgccccagccaccguguguggccccaagaagagcaccaaccuggugaagaacaagugcgugaacuucaacuucaacggccuuaccggcaccggcgugcugaccgagagcaacaagaaauuccugcccuuucagcaguucggccgggacaucgccgacaccaccgacgcugugcgggauccccagacccuggagauccuggacaucaccccuugcagcuucggcggcgugagcgugaucaccccaggcaccaacaccagcaaccagguggccgugcuguaccaggacgugaacugcaccgaggugcccguggccauccacgccgaccagcugacacccaccuggcgggucuacagcaccggcagcaacguguuccagacccgggccgguugccugaucggcgccgagcacgugaacaacagcuacgagugcgacauccccaucggcgccggcaucugugccagcuaccagacccagaccaauucacccggcagcggcggcagcguggccagccagagcaucaucgccuacaccaugagccugggcgccgagaacagcguggccuacagcaacaacagcaucgccauccccaccaacuucaccaucagcgugaccaccgagauucugcccgugagcaugaccaagaccagcguggacugcaccauguacaucugcggcgacagcaccgagugcagcaaccugcugcugcaguacggcagcuucugcacccagcugaaccgggcccugaccggcaucgccguggagcaggacaagaacacccaggagguguucgcccaggugaagcagaucuacaagaccccucccaucaaggacuucggcggcuucaacuucagccagauccugcccgaccccagcaagcccagcaagcggagcuucaucgaggaccugcuguucaacaaggugacccuagccgacgccggcuucaucaagcaguacggcgacugccucggcgacauagccgcccgggaccugaucugcgcccagaaguucaacggccugaccgugcugccuccccugcugaccgacgagaugaucgcccaguacaccagcgcccuguuagccggaaccaucaccagcggcuggacuuucggcgcuggagccgcucugcagauccccuucgccaugcagauggccuaccgguucaacggcaucggcgugacccagaacgugcuguacgagaaccagaagcugaucgccaaccaguucaacagcgccaucggcaagauccaggacagccugagcagcaccgcuagcgcccugggcaagcugcaggacguggugaaccagaacgcccaggcccugaacacccuggugaagcagcugagcagcaacuucggcgccaucagcagcgugcugaacgacauccugagccggcuggacccucccgaggccgaggugcagaucgaccggcugaucacuggccggcugcagagccugcagaccuacgugacccagcagcugauccgggccgccgagauucgggccagcgccaaccuggccgccaccaagaugagcgagugcgugcugggccagagcaagcggguggacuucugcggcaagggcuaccaccugaugagcuuuccccagagcgcaccccacggagugguguuccugcacgugaccuacgugcccgcccaggagaagaacuucaccaccgccccagccaucugccacgacggcaaggcccacuuuccccgggagggcguguucgugagcaacggcacccacugguucgugacccagcggaacuucuacgagccccagaucaucaccaccgacaacaccuucgugagcggcaacugcgacguggugaucggcaucgugaacaacaccguguacgauccccugcagcccgagcuggacagcuucaaggaggagcuggacaaguacuucaagaaucacaccagccccgacguggaccugggcgacaucagcggcaucaacgccagcguggugaacauccagaaggagaucgaucggcugaacgagguggccaagaaccugaacgagagccugaucgaccugcaggagcugggcaaguacgagcaguacaucaaguggcccugguacaucuggcugggcuucaucgccggccugaucgccaucgugauggugaccaucaugcugugcugcaugaccagcugcugcagcugccugaagggcuguugcagcugcggcagcugcugcaaguucgacgaggacgacagcgagcccgugcugaagggcgugaagcugcacuacaccugauaauaggcuggagccucgguggccuagcuucuugccccuugggccuccccccagccccuccuccccuuccugcacccguacccccguggucuuugaauaaagucugagugggcggc

SEQ ID NO: 16 - RNA, 3819 nt, Artificial Sequence
  Synthetic
auguucguguuccuggugcugcugccccuggugagcagccagugcgugaaccugaccacccggacccagcugccaccagccuacaccaacagcuucacccggggcgucuacuaccccgacaagguguuccggagcagcguccugcacagcacccaggaccuguuccugcccuucuucagcaacgugaccugguuccacgccauccacgugagcggcaccaacggcaccaagcgguucgacaaccccgugcugcccuucaacgacggcguguacuucgccagcaccgagaagagcaacaucauccggggcuggaucuucggcaccacccuggacagcaagacccagagccugcugaucgugaauaacgccaccaacguggugaucaaggugugcgaguuccaguucugcaacgaccccuuccugggcguguacuaccacaagaacaacaagagcuggauggagagcgaguuccggguguacagcagcgccaacaacugcaccuucgaguacgugagccagcccuuccugauggaccuggagggcaagcagggcaacuucaagaaccugcgggaguucguguucaagaacaucgacggcuacuucaagaucuacagcaagcacaccccaaucaaccuggugcgggaucugccccagggcuucucagcccuggagccccugguggaccugcccaucggcaucaacaucacccgguuccagacccugcuggcccugcaccggagcuaccugaccccaggcgacagcagcagcggguggacagcaggcgcggcugcuuacuacgugggcuaccugcagccccggaccuuccugcugaaguacaacgagaacggcaccaucaccgacgccguggacugcgcccuggacccucugagcgagaccaagugcacccugaagagcuucaccguggagaagggcaucuaccagaccagcaacuuccgggugcagcccaccgagagcaucgugcgguuccccaacaucaccaaccugugccccuucggcgagguguucaacgccacccgguucgccagcguguacgccuggaaccggaagcggaucagcaacugcguggccgacuacagcgugcuguacaacagcgccagcuucagcaccuucaagugcuacggcgugagccccaccaagcugaacgaccugugcuucaccaacguguacgccgacagcuucgugauccguggcgacgaggugcggcagaucgcacccggccagacaggcaagaucgccgacuacaacuacaagcugcccgacgacuucaccggcugcgugaucgccuggaacagcaacaaccucgacagcaaggugggcggcaacuacaacuaccuguaccggcuguuccggaagagcaaccugaagcccuucgagcgggacaucagcaccgagaucuaccaagccggcuccaccccuugcaacggcguggagggcuucaacugcuacuucccucugcagagcuacggcuuccagcccaccaacggcgugggcuaccagcccuaccgggugguggugcugagcuucgagcugcugcacgccccagccaccguguguggccccaagaagagcaccaaccuggugaagaacaagugcgugaacuucaacuucaacggccuuaccggcaccggcgugcugaccgagagcaacaagaaauuccugcccuuucagcaguucggccgggacaucgccgacaccaccgacgcugugcgggauccccagacccuggagauccuggacaucaccccuugcagcuucggcggcgugagcgugaucaccccaggcaccaacaccagcaaccagguggccgugcuguaccaggacgugaacugcaccgaggugcccguggccauccacgccgaccagcugacacccaccuggcgggucuacagcaccggcagcaacguguuccagacccgggccgguugccugaucggcgccgagcacgugaacaacagcuacgagugcgacauccccaucggcgccggcaucugugccagcuaccagacccagaccaauucacccggcagcggcggcagcguggccagccagagcaucaucgccuacaccaugagccugggcgccgagaacagcguggccuacagcaacaacagcaucgccauccccaccaacuucaccaucagcgugaccaccgagauucugcccgugagcaugaccaagaccagcguggacugcaccauguacaucugcggcgacagcaccgagugcagcaaccugcugcugcaguacggcagcuucugcacccagcugaaccgggcccugaccggcaucgccguggagcaggacaagaacacccaggagguguucgcccaggugaagcagaucuacaagaccccucccaucaaggacuucggcggcuucaacuucagccagauccugcccgaccccagcaagcccagcaagcggagcuucaucgaggaccugcuguucaacaaggugacccuagccgacgccggcuucaucaagcaguacggcgacugccucggcgacauagccgcccgggaccugaucugcgcccagaaguucaacggccugaccgugcugccuccccugcugaccgacgagaugaucgcccaguacaccagcgcccuguuagccggaaccaucaccagcggcuggacuuucggcgcuggagccgcucugcagauccccuucgccaugcagauggccuaccgguucaacggcaucggcgugacccagaacgugcuguacgagaaccagaagcugaucgccaaccaguucaacagcgccaucggcaagauccaggacagccugagcagcaccgcuagcgcccugggcaagcugcaggacguggugaaccagaacgcccaggcccugaacacccuggugaagcagcugagcagcaacuucggcgccaucagcagcgugcugaacgacauccugagccggcuggacccucccgaggccgaggugcagaucgaccggcugaucacuggccggcugcagagccugcagaccuacgugacccagcagcugauccgggccgccgagauucgggccagcgccaaccuggccgccaccaagaugagcgagugcgugcugggccagagcaagcggguggacuucugcggcaagggcuaccaccugaugagcuuuccccagagcgcaccccacggagugguguuccugcacgugaccuacgugcccgcccaggagaagaacuucaccaccgccccagccaucugccacgacggcaaggcccacuuuccccgggagggcguguucgugagcaacggcacccacugguucgugacccagcggaacuucuacgagccccagaucaucaccaccgacaacaccuucgugagcggcaacugcgacguggugaucggcaucgugaacaacaccguguacgauccccugcagcccgagcuggacagcuucaaggaggagcuggacaaguacuucaagaaucacaccagccccgacguggaccugggcgacaucagcggcaucaacgccagcguggugaacauccagaaggagaucgaucggcugaacgagguggccaagaaccugaacgagagccugaucgaccugcaggagcugggcaaguacgagcaguacaucaaguggcccugguacaucuggcugggcuucaucgccggccugaucgccaucgugauggugaccaucaugcugugcugcaugaccagcugcugcagcugccugaagggcuguugcagcugcggcagcugcugcaaguucgacgaggacgacagcgagcccgugcugaagggcgugaagcugcacuacacc

SEQ ID NO: 17 - protein, 1273 aa, Artificial Sequence
  Synthetic
MFVFLVLLPLVSSQCVNLTTRTQLPPAYTNSFTRGVYYPDKVFRSSVLHSTQDLFLPFFSNVTWFHAIHVSGTNGTKRFDNPVLPFNDGVYFASTEKSNIIRGWIFGTTLDSKTQSLLIVNNATNVVIKVCEFQFCNDPFLGVYYHKNNKSWMESEFRVYSSANNCTFEYVSQPFLMDLEGKQGNFKNLREFVFKNIDGYFKIYSKHTPINLVRDLPQGFSALEPLVDLPIGINITRFQTLLALHRSYLTPGDSSSGWTAGAAAYYVGYLQPRTFLLKYNENGTITDAVDCALDPLSETKCTLKSFTVEKGIYQTSNFRVQPTESIVRFPNITNLCPFGEVFNATRFASVYAWNRKRISNCVADYSVLYNSASFSTFKCYGVSPTKLNDLCFTNVYADSFVIRGDEVRQIAPGQTGKIADYNYKLPDDFTGCVIAWNSNNLDSKVGGNYNYLYRLFRKSNLKPFERDISTEIYQAGSTPCNGVEGFNCYFPLQSYGFQPTNGVGYQPYRVVVLSFELLHAPATVCGPKKSTNLVKNKCVNFNFNGLTGTGVLTESNKKFLPFQQFGRDIADTTDAVRDPQTLEILDITPCSFGGVSVITPGTNTSNQVAVLYQDVNCTEVPVAIHADQLTPTWRVYSTGSNVFQTRAGCLIGAEHVNNSYECDIPIGAGICASYQTQTNSPGSGGSVASQSIIAYTMSLGAENSVAYSNNSIAIPTNFTISVTTEILPVSMTKTSVDCTMYICGDSTECSNLLLQYGSFCTQLNRALTGIAVEQDKNTQEVFAQVKQIYKTPPIKDFGGFNFSQILPDPSKPSKRSFIEDLLFNKVTLADAGFIKQYGDCLGDIAARDLICAQKFNGLTVLPPLLTDEMIAQYTSALLAGTITSGWTFGAGAALQIPFAMQMAYRFNGIGVTQNVLYENQKLIANQFNSAIGKIQDSLSSTASALGKLQDVVNQNAQALNTLVKQLSSNFGAISSVLNDILSRLDPPEAEVQIDRLITGRLQSLQTYVTQQLIRAAEIRASANLAATKMSECVLGQSKRVDFCGKGYHLMSFPQSAPHGVVFLHVTYVPAQEKNFTTAPAICHDGKAHFPREGVFVSNGTHWFVTQRNFYEPQIITTDNTFVSGNCDVVIGIVNNTVYDPLQPELDSFKEELDKYFKNHTSPDVDLGDISGINASVVNIQKEIDRLNEVAKNLNESLIDLQELGKYEQYIKWPWYIWLGFIAGLIAIVMVTIMLCCMTSCCSCLKGCCSCGSCCKFDEDDSEPVLKGVKLHYT

SEQ ID NO: 18 - RNA, 3878 nt, Artificial Sequence
  Synthetic
gggaaauaagagagaaaagaagaguaagaagaaauauaagaccccggcgccgccaccauguucguguuccuggugcugcugccccuggugagcagccagugcgugaaccugaccacccggacccagcugccaccagccuacaccaacagcuucacccggggcgucuacuaccccgacaagguguuccggagcagcguccugcacagcacccaggaccuguuccugcccuucuucagcaacgugaccugguuccacgccauccacgugagcggcaccaacggcaccaagcgguucgacaaccccgugcugcccuucaacgacggcguguacuucgccagcaccgagaagagcaacaucauccggggcuggaucuucggcaccacccuggacagcaagacccagagccugcugaucgugaauaacgccaccaacguggugaucaaggugugcgaguuccaguucugcaacgaccccuuccugggcguguacuaccacaagaacaacaagagcuggauggagagcgaguuccggguguacagcagcgccaacaacugcaccuucgaguacgugagccagcccuuccugauggaccuggagggcaagcagggcaacuucaagaaccugcgggaguucguguucaagaacaucgacggcuacuucaagaucuacagcaagcacaccccaaucaaccuggugcgggaucugccccagggcuucucagcccuggagccccugguggaccugcccaucggcaucaacaucacccgguuccagacccugcuggcccugcaccggagcuaccugaccccaggcgacagcagcagcggguggacagcaggcgcggcugcuuacuacgugggcuaccugcagccccggaccuuccugcugaaguacaacgagaacggcaccaucaccgacgccguggacugcgcccuggacccucugagcgagaccaagugcacccugaagagcuucaccguggagaagggcaucuaccagaccagcaacuuccgggugcagcccaccgagagcaucgugcgguuccccaacaucaccaaccugugccccuucggcgagguguucaacgccacccgguucgccagcguguacgccuggaaccggaagcggaucagcaacugcguggccgacuacagcgugcuguacaacagcgccagcuucagcaccuucaagugcuacggcgugagccccaccaagcugaacgaccugugcuucaccaacguguacgccgacagcuucgugauccguggcgacgaggugcggcagaucgcacccggccagacaggcaagaucgccgacuacaacuacaagcugcccgacgacuucaccggcugcgugaucgccuggaacagcaacaaccucgacagcaaggugggcggcaacuacaacuaccuguaccggcuguuccggaagagcaaccugaagcccuucgagcgggacaucagcaccgagaucuaccaagccggcuccaccccuugcaacggcguggagggcuucaacugcuacuucccucugcagagcuacggcuuccagcccaccaacggcgugggcuaccagcccuaccgggugguggugcugagcuucgagcugcugcacgccccagccaccguguguggccccaagaagagcaccaaccuggugaagaacaagugcgugaacuucaacuucaacggccuuaccggcaccggcgugcugaccgagagcaacaagaaauuccugcccuuucagcaguucggccgggacaucgccgacaccaccgacgcugugcgggauccccagacccuggagauccuggacaucaccccuugcagcuucggcggcgugagcgugaucaccccaggcaccaacaccagcaaccagguggccgugcuguaccaggacgugaacugcaccgaggugcccguggccauccacgccgaccagcugacacccaccuggcgggucuacagcaccggcagcaacguguuccagacccgggccgguugccugaucggcgccgagcacgugaacaacagcuacgagugcgacauccccaucggcgccggcaucugugccagcuaccagacccagaccaauucaccccggagggcaaggagcguggccagccagagcaucaucgccuacaccaugagccugggcgccgagaacagcguggccuacagcaacaacagcaucgccauccccaccaacuucaccaucagcgugaccaccgagauucugcccgugagcaugaccaagaccagcguggacugcaccauguacaucugcggcgacagcaccgagugcagcaaccugcugcugcaguacggcagcuucugcacccagcugaaccgggcccugaccggcaucgccguggagcaggacaagaacacccaggagguguucgcccaggugaagcagaucuacaagaccccucccaucaaggacuucggcggcuucaacuucagccagauccugcccgaccccagcaagcccagcaagcggagcuucaucgaggaccugcuguucaacaaggugacccuagccgacgccggcuucaucaagcaguacggcgacugccucggcgacauagccgcccgggaccugaucugcgcccagaaguucaacggccugaccgugcugccuccccugcugaccgacgagaugaucgcccaguacaccagcgcccuguuagccggaaccaucaccagcggcuggacuuucggcgcuggagccgcucugcagauccccuucgccaugcagauggccuaccgguucaacggcaucggcgugacccagaacgugcuguacgagaaccagaagcugaucgccaaccaguucaacagcgccaucggcaagauccaggacagccugagcagcaccgcuagcgcccugggcaagcugcaggacguggugaaccagaacgcccaggcccugaacacccuggugaagcagcugagcagcaacuucggcgccaucagcagcgugcugaacgacauccugagccggcuggacccucccgaggccgaggugcagaucgaccggcugaucacuggccggcugcagagccugcagaccuacgugacccagcagcugauccgggccgccgagauucgggccagcgccaaccuggccgccaccaagaugagcgagugcgugcugggccagagcaagcggguggacuucugcggcaagggcuaccaccugaugagcuuuccccagagcgcaccccacggagugguguuccugcacgugaccuacgugcccgcccaggagaagaacuucaccaccgccccagccaucugccacgacggcaaggcccacuuuccccgggagggcguguucgugagcaacggcacccacugguucgugacccagcggaacuucuacgagccccagaucaucaccaccgacaacaccuucgugagcggcaacugcgacguggugaucggcaucgugaacaacaccguguacgauccccugcagcccgagcuggacagcuucaaggaggagcuggacaaguacuucaagaaucacaccagccccgacguggaccugggcgacaucagcggcaucaacgccagcguggugaacauccagaaggagaucgaucggcugaacgagguggccaagaaccugaacgagagccugaucgaccugcaggagcugggcaaguacgagcaguacaucaaguggcccugguacaucuggcugggcuucaucgccggccugaucgccaucgugauggugaccaucaugcugugauaauaggcuggagccucgguggccuagcuucuugccccuugggccuccccccagccccuccuccccuuccugcacccguacccccguggucuuugaauaaagucugagugggcggc

SEQ ID NO: 19 - RNA, 3702 nt, Artificial Sequence
  Synthetic
auguucguguuccuggugcugcugccccuggugagcagccagugcgugaaccugaccacccggacccagcugccaccagccuacaccaacagcuucacccggggcgucuacuaccccgacaagguguuccggagcagcguccugcacagcacccaggaccuguuccugcccuucuucagcaacgugaccugguuccacgccauccacgugagcggcaccaacggcaccaagcgguucgacaaccccgugcugcccuucaacgacggcguguacuucgccagcaccgagaagagcaacaucauccggggcuggaucuucggcaccacccuggacagcaagacccagagccugcugaucgugaauaacgccaccaacguggugaucaaggugugcgaguuccaguucugcaacgaccccuuccugggcguguacuaccacaagaacaacaagagcuggauggagagcgaguuccggguguacagcagcgccaacaacugcaccuucgaguacgugagccagcccuuccugauggaccuggagggcaagcagggcaacuucaagaaccugcgggaguucguguucaagaacaucgacggcuacuucaagaucuacagcaagcacaccccaaucaaccuggugcgggaucugccccagggcuucucagcccuggagccccugguggaccugcccaucggcaucaacaucacccgguuccagacccugcuggcccugcaccggagcuaccugaccccaggcgacagcagcagcggguggacagcaggcgcggcugcuuacuacgugggcuaccugcagccccggaccuuccugcugaaguacaacgagaacggcaccaucaccgacgccguggacugcgcccuggacccucugagcgagaccaagugcacccugaagagcuucaccguggagaagggcaucuaccagaccagcaacuuccgggugcagcccaccgagagcaucgugcgguuccccaacaucaccaaccugugccccuucggcgagguguucaacgccacccgguucgccagcguguacgccuggaaccggaagcggaucagcaacugcguggccgacuacagcgugcuguacaacagcgccagcuucagcaccuucaagugcuacggcgugagccccaccaagcugaacgaccugugcuucaccaacguguacgccgacagcuucgugauccguggcgacgaggugcggcagaucgcacccggccagacaggcaagaucgccgacuacaacuacaagcugcccgacgacuucaccggcugcgugaucgccuggaacagcaacaaccucgacagcaaggugggcggcaacuacaacuaccuguaccggcuguuccggaagagcaaccugaagcccuucgagcgggacaucagcaccgagaucuaccaagccggcuccaccccuugcaacggcguggagggcuucaacugcuacuucccucugcagagcuacggcuuccagcccaccaacggcgugggcuaccagcccuaccgggugguggugcugagcuucgagcugcugcacgccccagccaccguguguggccccaagaagagcaccaaccuggugaagaacaagugcgugaacuucaacuucaacggccuuaccggcaccggcgugcugaccgagagcaacaagaaauuccugcccuuucagcaguucggccgggacaucgccgacaccaccgacgcugugcgggauccccagacccuggagauccuggacaucaccccuugcagcuucggcggcgugagcgugaucaccccaggcaccaacaccagcaaccagguggccgugcuguaccaggacgugaacugcaccgaggugcccguggccauccacgccgaccagcugacacccaccuggcgggucuacagcaccggcagcaacguguuccagacccgggccgguugccugaucggcgccgagcacgugaacaacagcuacgagugcgacauccccaucggcgccggcaucugugccagcuaccagacccagaccaauucaccccggagggcaaggagcguggccagccagagcaucaucgccuacaccaugagccugggcgccgagaacagcguggccuacagcaacaacagcaucgccauccccaccaacuucaccaucagcgugaccaccgagauucugcccgugagcaugaccaagaccagcguggacugcaccauguacaucugcggcgacagcaccgagugcagcaaccugcugcugcaguacggcagcuucugcacccagcugaaccgggcccugaccggcaucgccguggagcaggacaagaacacccaggagguguucgcccaggugaagcagaucuacaagaccccucccaucaaggacuucggcggcuucaacuucagccagauccugcccgaccccagcaagcccagcaagcggagcuucaucgaggaccugcuguucaacaaggugacccuagccgacgccggcuucaucaagcaguacggcgacugccucggcgacauagccgcccgggaccugaucugcgcccagaaguucaacggccugaccgugcugccuccccugcugaccgacgagaugaucgcccaguacaccagcgcccuguuagccggaaccaucaccagcggcuggacuuucggcgcuggagccgcucugcagauccccuucgccaugcagauggccuaccgguucaacggcaucggcgugacccagaacgugcuguacgagaaccagaagcugaucgccaaccaguucaacagcgccaucggcaagauccaggacagccugagcagcaccgcuagcgcccugggcaagcugcaggacguggugaaccagaacgcccaggcccugaacacccuggugaagcagcugagcagcaacuucggcgccaucagcagcgugcugaacgacauccugagccggcuggacccucccgaggccgaggugcagaucgaccggcugaucacuggccggcugcagagccugcagaccuacgugacccagcagcugauccgggccgccgagauucgggccagcgccaaccuggccgccaccaagaugagcgagugcgugcugggccagagcaagcggguggacuucugcggcaagggcuaccaccugaugagcuuuccccagagcgcaccccacggagugguguuccugcacgugaccuacgugcccgcccaggagaagaacuucaccaccgccccagccaucugccacgacggcaaggcccacuuuccccgggagggcguguucgugagcaacggcacccacugguucgugacccagcggaacuucuacgagccccagaucaucaccaccgacaacaccuucgugagcggcaacugcgacguggugaucggcaucgugaacaacaccguguacgauccccugcagcccgagcuggacagcuucaaggaggagcuggacaaguacuucaagaaucacaccagccccgacguggaccugggcgacaucagcggcaucaacgccagcguggugaacauccagaaggagaucgaucggcugaacgagguggccaagaaccugaacgagagccugaucgaccugcaggagcugggcaaguacgagcaguacaucaaguggcccugguacaucuggcugggcuucaucgccggccugaucgccaucgugauggugaccaucaugcug

SEQ ID NO: 20 - protein, 1234 aa, Artificial Sequence
  Synthetic
MFVFLVLLPLVSSQCVNLTTRTQLPPAYTNSFTRGVYYPDKVFRSSVLHSTQDLFLPFFSNVTWFHAIHVSGTNGTKRFDNPVLPFNDGVYFASTEKSNIIRGWIFGTTLDSKTQSLLIVNNATNVVIKVCEFQFCNDPFLGVYYHKNNKSWMESEFRVYSSANNCTFEYVSQPFLMDLEGKQGNFKNLREFVFKNIDGYFKIYSKHTPINLVRDLPQGFSALEPLVDLPIGINITRFQTLLALHRSYLTPGDSSSGWTAGAAAYYVGYLQPRTFLLKYNENGTITDAVDCALDPLSETKCTLKSFTVEKGIYQTSNFRVQPTESIVRFPNITNLCPFGEVFNATRFASVYAWNRKRISNCVADYSVLYNSASFSTFKCYGVSPTKLNDLCFTNVYADSFVIRGDEVRQIAPGQTGKIADYNYKLPDDFTGCVIAWNSNNLDSKVGGNYNYLYRLFRKSNLKPFERDISTEIYQAGSTPCNGVEGFNCYFPLQSYGFQPTNGVGYQPYRVVVLSFELLHAPATVCGPKKSTNLVKNKCVNFNFNGLTGTGVLTESNKKFLPFQQFGRDIADTTDAVRDPQTLEILDITPCSFGGVSVITPGTNTSNQVAVLYQDVNCTEVPVAIHADQLTPTWRVYSTGSNVFQTRAGCLIGAEHVNNSYECDIPIGAGICASYQTQTNSPRRARSVASQSIIAYTMSLGAENSVAYSNNSIAIPTNFTISVTTEILPVSMTKTSVDCTMYICGDSTECSNLLLQYGSFCTQLNRALTGIAVEQDKNTQEVFAQVKQIYKTPPIKDFGGFNFSQILPDPSKPSKRSFIEDLLFNKVTLADAGFIKQYGDCLGDIAARDLICAQKFNGLTVLPPLLTDEMIAQYTSALLAGTITSGWTFGAGAALQIPFAMQMAYRFNGIGVTQNVLYENQKLIANQFNSAIGKIQDSLSSTASALGKLQDVVNQNAQALNTLVKQLSSNFGAISSVLNDILSRLDPPEAEVQIDRLITGRLQSLQTYVTQQLIRAAEIRASANLAATKMSECVLGQSKRVDFCGKGYHLMSFPQSAPHGVVFLHVTYVPAQEKNFTTAPAICHDGKAHFPREGVFVSNGTHWFVTQRNFYEPQIITTDNTFVSGNCDVVIGIVNNTVYDPLQPELDSFKEELDKYFKNHTSPDVDLGDISGINASVVNIQKEIDRLNEVAKNLNESLIDLQELGKYEQYIKWPWYIWLGFIAGLIAIVMVTIML

SEQ ID NO: 21 - RNA, 3986 nt, Artificial Sequence
  Synthetic
gggaaauaagagagaaaagaagaguaagaagaaauauaagaccccggcgccgccaccauguucguguuccuggugcugcugccccuggugagcagccagugcgugaaccugaccacccggacccagcugccaccagccuacaccaacagcuucacccggggcgucuacuaccccgacaagguguuccggagcagcguccugcacagcacccaggaccuguuccugcccuucuucagcaacgugaccugguuccacgccauccacgugagcggcaccaacggcaccaagcgguucgacaaccccgugcugcccuucaacgacggcguguacuucgccagcaccgagaagagcaacaucauccggggcuggaucuucggcaccacccuggacagcaagacccagagccugcugaucgugaauaacgccaccaacguggugaucaaggugugcgaguuccaguucugcaacgaccccuuccugggcguguacuaccacaagaacaacaagagcuggauggagagcgaguuccggguguacagcagcgccaacaacugcaccuucgaguacgugagccagcccuuccugauggaccuggagggcaagcagggcaacuucaagaaccugcgggaguucguguucaagaacaucgacggcuacuucaagaucuacagcaagcacaccccaaucaaccuggugcgggaucugccccagggcuucucagcccuggagccccugguggaccugcccaucggcaucaacaucacccgguuccagacccugcuggcccugcaccggagcuaccugaccccaggcgacagcagcagcggguggacagcaggcgcggcugcuuacuacgugggcuaccugcagccccggaccuuccugcugaaguacaacgagaacggcaccaucaccgacgccguggacugcgcccuggacccucugagcgagaccaagugcacccugaagagcuucaccguggagaagggcaucuaccagaccagcaacuuccgggugcagcccaccgagagcaucgugcgguuccccaacaucaccaaccugugccccuucggcgagguguucaacgccacccgguucgccagcguguacgccuggaaccggaagcggaucagcaacugcguggccgacuacagcgugcuguacaacagcgccagcuucagcaccuucaagugcuacggcgugagccccaccaagcugaacgaccugugcuucaccaacguguacgccgacagcuucgugauccguggcgacgaggugcggcagaucgcacccggccagacaggcaagaucgccgacuacaacuacaagcugcccgacgacuucaccggcugcgugaucgccuggaacagcaacaaccucgacagcaaggugggcggcaacuacaacuaccuguaccggcuguuccggaagagcaaccugaagcccuucgagcgggacaucagcaccgagaucuaccaagccggcuccaccccuugcaacggcguggagggcuucaacugcuacuucccucugcagagcuacggcuuccagcccaccaacggcgugggcuaccagcccuaccgggugguggugcugagcuucgagcugcugcacgccccagccaccguguguggccccaagaagagcaccaaccuggugaagaacaagugcgugaacuucaacuucaacggccuuaccggcaccggcgugcugaccgagagcaacaagaaauuccugcccuuucagcaguucggccgggacaucgccgacaccaccgacgcugugcgggauccccagacccuggagauccuggacaucaccccuugcagcuucggcggcgugagcgugaucaccccaggcaccaacaccagcaaccagguggccgugcuguaccaggacgugaacugcaccgaggugcccguggccauccacgccgaccagcugacacccaccuggcgggucuacagcaccggcagcaacguguuccagacccgggccgguugccugaucggcgccgagcacgugaacaacagcuacgagugcgacauccccaucggcgccggcaucugugccagcuaccagacccagaccgugucacugaggagcguggccagccagagcaucaucgccuacaccaugagccugggcgccgagaacagcguggccuacagcaacaacagcaucgccauccccaccaacuucaccaucagcgugaccaccgagauucugcccgugagcaugaccaagaccagcguggacugcaccauguacaucugcggcgacagcaccgagugcagcaaccugcugcugcaguacggcagcuucugcacccagcugaaccgggcccugaccggcaucgccguggagcaggacaagaacacccaggagguguucgcccaggugaagcagaucuacaagaccccucccaucaaggacuucggcggcuucaacuucagccagauccugcccgaccccagcaagcccagcaagcggagcuucaucgaggaccugcuguucaacaaggugacccuagccgacgccggcuucaucaagcaguacggcgacugccucggcgacauagccgcccgggaccugaucugcgcccagaaguucaacggccugaccgugcugccuccccugcugaccgacgagaugaucgcccaguacaccagcgcccuguuagccggaaccaucaccagcggcuggacuuucggcgcuggagccgcucugcagauccccuucgccaugcagauggccuaccgguucaacggcaucggcgugacccagaacgugcuguacgagaaccagaagcugaucgccaaccaguucaacagcgccaucggcaagauccaggacagccugagcagcaccgcuagcgcccugggcaagcugcaggacguggugaaccagaacgcccaggcccugaacacccuggugaagcagcugagcagcaacuucggcgccaucagcagcgugcugaacgacauccugagccggcuggacaagguggaggccgaggugcagaucgaccggcugaucacuggccggcugcagagccugcagaccuacgugacccagcagcugauccgggccgccgagauucgggccagcgccaaccuggccgccaccaagaugagcgagugcgugcugggccagagcaagcggguggacuucugcggcaagggcuaccaccugaugagcuuuccccagagcgcaccccacggagugguguuccugcacgugaccuacgugcccgcccaggagaagaacuucaccaccgccccagccaucugccacgacggcaaggcccacuuuccccgggagggcguguucgugagcaacggcacccacugguucgugacccagcggaacuucuacgagccccagaucaucaccaccgacaacaccuucgugagcggcaacugcgacguggugaucggcaucgugaacaacaccguguacgauccccugcagcccgagcuggacagcuucaaggaggagcuggacaaguacuucaagaaucacaccagccccgacguggaccugggcgacaucagcggcaucaacgccagcguggugaacauccagaaggagaucgaucggcugaacgagguggccaagaaccugaacgagagccugaucgaccugcaggagcugggcaaguacgagcaguacaucaaguggcccugguacaucuggcugggcuucaucgccggccugaucgccaucgugauggugaccaucaugcugugcugcaugaccagcugcugcagcugccugaagggcuguugcagcugcggcagcugcugcaaguucgacgaggacgacagcgagcccgugcugaagggcgugaagcugcacuacaccugauaauaggcuggagccucgguggccuagcuucuugccccuugggccuccccccagccccuccuccccuuccugcacccguacccccguggucuuugaauaaagucugagugggcggc

SEQ ID NO: 22 - RNA, 3810 nt, Artificial Sequence
  Synthetic
auguucguguuccuggugcugcugccccuggugagcagccagugcgugaaccugaccacccggacccagcugccaccagccuacaccaacagcuucacccggggcgucuacuaccccgacaagguguuccggagcagcguccugcacagcacccaggaccuguuccugcccuucuucagcaacgugaccugguuccacgccauccacgugagcggcaccaacggcaccaagcgguucgacaaccccgugcugcccuucaacgacggcguguacuucgccagcaccgagaagagcaacaucauccggggcuggaucuucggcaccacccuggacagcaagacccagagccugcugaucgugaauaacgccaccaacguggugaucaaggugugcgaguuccaguucugcaacgaccccuuccugggcguguacuaccacaagaacaacaagagcuggauggagagcgaguuccggguguacagcagcgccaacaacugcaccuucgaguacgugagccagcccuuccugauggaccuggagggcaagcagggcaacuucaagaaccugcgggaguucguguucaagaacaucgacggcuacuucaagaucuacagcaagcacaccccaaucaaccuggugcgggaucugccccagggcuucucagcccuggagccccugguggaccugcccaucggcaucaacaucacccgguuccagacccugcuggcccugcaccggagcuaccugaccccaggcgacagcagcagcggguggacagcaggcgcggcugcuuacuacgugggcuaccugcagccccggaccuuccugcugaaguacaacgagaacggcaccaucaccgacgccguggacugcgcccuggacccucugagcgagaccaagugcacccugaagagcuucaccguggagaagggcaucuaccagaccagcaacuuccgggugcagcccaccgagagcaucgugcgguuccccaacaucaccaaccugugccccuucggcgagguguucaacgccacccgguucgccagcguguacgccuggaaccggaagcggaucagcaacugcguggccgacuacagcgugcuguacaacagcgccagcuucagcaccuucaagugcuacggcgugagccccaccaagcugaacgaccugugcuucaccaacguguacgccgacagcuucgugauccguggcgacgaggugcggcagaucgcacccggccagacaggcaagaucgccgacuacaacuacaagcugcccgacgacuucaccggcugcgugaucgccuggaacagcaacaaccucgacagcaaggugggcggcaacuacaacuaccuguaccggcuguuccggaagagcaaccugaagcccuucgagcgggacaucagcaccgagaucuaccaagccggcuccaccccuugcaacggcguggagggcuucaacugcuacuucccucugcagagcuacggcuuccagcccaccaacggcgugggcuaccagcccuaccgggugguggugcugagcuucgagcugcugcacgccccagccaccguguguggccccaagaagagcaccaaccuggugaagaacaagugcgugaacuucaacuucaacggccuuaccggcaccggcgugcugaccgagagcaacaagaaauuccugcccuuucagcaguucggccgggacaucgccgacaccaccgacgcugugcgggauccccagacccuggagauccuggacaucaccccuugcagcuucggcggcgugagcgugaucaccccaggcaccaacaccagcaaccagguggccgugcuguaccaggacgugaacugcaccgaggugcccguggccauccacgccgaccagcugacacccaccuggcgggucuacagcaccggcagcaacguguuccagacccgggccgguugccugaucggcgccgagcacgugaacaacagcuacgagugcgacauccccaucggcgccggcaucugugccagcuaccagacccagaccgugucacugaggagcguggccagccagagcaucaucgccuacaccaugagccugggcgccgagaacagcguggccuacagcaacaacagcaucgccauccccaccaacuucaccaucagcgugaccaccgagauucugcccgugagcaugaccaagaccagcguggacugcaccauguacaucugcggcgacagcaccgagugcagcaaccugcugcugcaguacggcagcuucugcacccagcugaaccgggcccugaccggcaucgccguggagcaggacaagaacacccaggagguguucgcccaggugaagcagaucuacaagaccccucccaucaaggacuucggcggcuucaacuucagccagauccugcccgaccccagcaagcccagcaagcggagcuucaucgaggaccugcuguucaacaaggugacccuagccgacgccggcuucaucaagcaguacggcgacugccucggcgacauagccgcccgggaccugaucugcgcccagaaguucaacggccugaccgugcugccuccccugcugaccgacgagaugaucgcccaguacaccagcgcccuguuagccggaaccaucaccagcggcuggacuuucggcgcuggagccgcucugcagauccccuucgccaugcagauggccuaccgguucaacggcaucggcgugacccagaacgugcuguacgagaaccagaagcugaucgccaaccaguucaacagcgccaucggcaagauccaggacagccugagcagcaccgcuagcgcccugggcaagcugcaggacguggugaaccagaacgcccaggcccugaacacccuggugaagcagcugagcagcaacuucggcgccaucagcagcgugcugaacgacauccugagccggcuggacaagguggaggccgaggugcagaucgaccggcugaucacuggccggcugcagagccugcagaccuacgugacccagcagcugauccgggccgccgagauucgggccagcgccaaccuggccgccaccaagaugagcgagugcgugcugggccagagcaagcggguggacuucugcggcaagggcuaccaccugaugagcuuuccccagagcgcaccccacggagugguguuccugcacgugaccuacgugcccgcccaggagaagaacuucaccaccgccccagccaucugccacgacggcaaggcccacuuuccccgggagggcguguucgugagcaacggcacccacugguucgugacccagcggaacuucuacgagccccagaucaucaccaccgacaacaccuucgugagcggcaacugcgacguggugaucggcaucgugaacaacaccguguacgauccccugcagcccgagcuggacagcuucaaggaggagcuggacaaguacuucaagaaucacaccagccccgacguggaccugggcgacaucagcggcaucaacgccagcguggugaacauccagaaggagaucgaucggcugaacgagguggccaagaaccugaacgagagccugaucgaccugcaggagcugggcaaguacgagcaguacaucaaguggcccugguacaucuggcugggcuucaucgccggccugaucgccaucgugauggugaccaucaugcugugcugcaugaccagcugcugcagcugccugaagggcuguugcagcugcggcagcugcugcaaguucgacgaggacgacagcgagcccgugcugaagggcgugaagcugcacuacacc

SEQ ID NO: 23 - protein, 1270 aa, Artificial Sequence
  Synthetic
MFVFLVLLPLVSSQCVNLTTRTQLPPAYTNSFTRGVYYPDKVFRSSVLHSTQDLFLPFFSNVTWFHAIHVSGTNGTKRFDNPVLPFNDGVYFASTEKSNIIRGWIFGTTLDSKTQSLLIVNNATNVVIKVCEFQFCNDPFLGVYYHKNNKSWMESEFRVYSSANNCTFEYVSQPFLMDLEGKQGNFKNLREFVFKNIDGYFKIYSKHTPINLVRDLPQGFSALEPLVDLPIGINITRFQTLLALHRSYLTPGDSSSGWTAGAAAYYVGYLQPRTFLLKYNENGTITDAVDCALDPLSETKCTLKSFTVEKGIYQTSNFRVQPTESIVRFPNITNLCPFGEVFNATRFASVYAWNRKRISNCVADYSVLYNSASFSTFKCYGVSPTKLNDLCFTNVYADSFVIRGDEVRQIAPGQTGKIADYNYKLPDDFTGCVIAWNSNNLDSKVGGNYNYLYRLFRKSNLKPFERDISTEIYQAGSTPCNGVEGFNCYFPLQSYGFQPTNGVGYQPYRVVVLSFELLHAPATVCGPKKSTNLVKNKCVNFNFNGLTGTGVLTESNKKFLPFQQFGRDIADTTDAVRDPQTLEILDITPCSFGGVSVITPGTNTSNQVAVLYQDVNCTEVPVAIHADQLTPTWRVYSTGSNVFQTRAGCLIGAEHVNNSYECDIPIGAGICASYQTQTVSLRSVASQSIIAYTMSLGAENSVAYSNNSIAIPTNFTISVTTEILPVSMTKTSVDCTMYICGDSTECSNLLLQYGSFCTQLNRALTGIAVEQDKNTQEVFAQVKQIYKTPPIKDFGGFNFSQILPDPSKPSKRSFIEDLLFNKVTLADAGFIKQYGDCLGDIAARDLICAQKFNGLTVLPPLLTDEMIAQYTSALLAGTITSGWTFGAGAALQIPFAMQMAYRFNGIGVTQNVLYENQKLIANQFNSAIGKIQDSLSSTASALGKLQDVVNQNAQALNTLVKQLSSNFGAISSVLNDILSRLDKVEAEVQIDRLITGRLQSLQTYVTQQLIRAAEIRASANLAATKMSECVLGQSKRVDFCGKGYHLMSFPQSAPHGVVFLHVTYVPAQEKNFTTAPAICHDGKAHFPREGVFVSNGTHWFVTQRNFYEPQIITTDNTFVSGNCDVVIGIVNNTVYDPLQPELDSFKEELDKYFKNHTSPDVDLGDISGINASVVNIQKEIDRLNEVAKNLNESLIDLQELGKYEQYIKWPWYIWLGFIAGLIAIVMVTIMLCCMTSCCSCLKGCCSCGSCCKFDEDDSEPVLKGVKLHYT

SEQ ID NO: 24 - RNA, 3980 nt, Artificial Sequence
  Synthetic
gggaaauaagagagaaaagaagaguaagaagaaauauaagaccccggcgccgccaccauguucguguuccuggugcugcugccccuggugagcagccagugcgugaaccugaccacccggacccagcugccaccagccuacaccaacagcuucacccggggcgucuacuaccccgacaagguguuccggagcagcguccugcacagcacccaggaccuguuccugcccuucuucagcaacgugaccugguuccacgccauccacgugagcggcaccaacggcaccaagcgguucgacaaccccgugcugcccuucaacgacggcguguacuucgccagcaccgagaagagcaacaucauccggggcuggaucuucggcaccacccuggacagcaagacccagagccugcugaucgugaauaacgccaccaacguggugaucaaggugugcgaguuccaguucugcaacgaccccuuccugggcguguacuaccacaagaacaacaagagcuggauggagagcgaguuccggguguacagcagcgccaacaacugcaccuucgaguacgugagccagcccuuccugauggaccuggagggcaagcagggcaacuucaagaaccugcgggaguucguguucaagaacaucgacggcuacuucaagaucuacagcaagcacaccccaaucaaccuggugcgggaucugccccagggcuucucagcccuggagccccugguggaccugcccaucggcaucaacaucacccgguuccagacccugcuggcccugcaccggagcuaccugaccccaggcgacagcagcagcggguggacagcaggcgcggcugcuuacuacgugggcuaccugcagccccggaccuuccugcugaaguacaacgagaacggcaccaucaccgacgccguggacugcgcccuggacccucugagcgagaccaagugcacccugaagagcuucaccguggagaagggcaucuaccagaccagcaacuuccgggugcagcccaccgagagcaucgugcgguuccccaacaucaccaaccugugccccuucggcgagguguucaacgccacccgguucgccagcguguacgccuggaaccggaagcggaucagcaacugcguggccgacuacagcgugcuguacaacagcgccagcuucagcaccuucaagugcuacggcgugagccccaccaagcugaacgaccugugcuucaccaacguguacgccgacagcuucgugauccguggcgacgaggugcggcagaucgcacccggccagacaggcaagaucgccgacuacaacuacaagcugcccgacgacuucaccggcugcgugaucgccuggaacagcaacaaccucgacagcaaggugggcggcaacuacaacuaccuguaccggcuguuccggaagagcaaccugaagcccuucgagcgggacaucagcaccgagaucuaccaagccggcuccaccccuugcaacggcguggagggcuucaacugcuacuucccucugcagagcuacggcuuccagcccaccaacggcgugggcuaccagcccuaccgggugguggugcugagcuucgagcugcugcacgccccagccaccguguguggccccaagaagagcaccaaccuggugaagaacaagugcgugaacuucaacuucaacggccuuaccggcaccggcgugcugaccgagagcaacaagaaauuccugcccuuucagcaguucggccgggacaucgccgacaccaccgacgcugugcgggauccccagacccuggagauccuggacaucaccccuugcagcuucggcggcgugagcgugaucaccccaggcaccaacaccagcaaccagguggccgugcuguaccaggacgugaacugcaccgaggugcccguggccauccacgccgaccagcugacacccaccuggcgggucuacagcaccggcagcaacguguuccagacccgggccgguugccugaucggcgccgagcacgugaacaacagcuacgagugcgacauccccaucggcgccggcaucugugccagcuaccagacccagaccaauucaccccggagggcaaggagcguggccagccagagcaucaucgccuacaccaugagccugggcgccgagaacagcguggccuacagcaacaacagcaucgccauccccaccaacuucaccaucagcgugaccaccgagauucugcccgugagcaugaccaagaccagcguggacugcaccauguacaucugcggcgacagcaccgagugcagcaaccugcugcugcaguacggcagcuucugcacccagcugaaccgggcccugaccggcaucgccguggagcaggacaagaacacccaggagguguucgcccaggugaagcagaucuacaagaccccucccaucaaggacuucggcggcuucaacuucagccagauccugcccgaccccagcaagcccagcaagcggagcuucaucgaggaccugcuguucaacaaggugacccuagccgacgccggcuucaucaagcaguacggcgacugccucggcgacauagccgcccgggaccugaucugcgcccagaaguucaacggccugaccgugcugccuccccugcugaccgacgagaugaucgcccaguacaccagcgcccuguuagccggaaccaucaccagcggcuggacuuucggcgcuggagccgcucugcagauccccuucgccaugcagauggccuaccgguucaacggcaucggcgugacccagaacgugcuguacgagaaccagaagcugaucgccaaccaguucaacagcgccaucggcaagauccaggacagccugagcagcaccgcuagcgcccugggcaagcugcaggacguggugaaccagaacgcccaggcccugaacacccuggugaagcagcugagcagcaacuucggcgccaucagcagcgugcugaacgacauccugagccggcuggacaagguggaggccgaggugcagaucgaccggcugaucacuggccggcugcagagccugcagaccuacgugacccagcagcugauccgggccgccgagauucgggccagcgccaaccuggccgccaccaagaugagcgagugcgugcugggccagagcaagcggguggacuucugcggcaagggcuaccaccugaugagcuuuccccagagcgcaccccacggagugguguuccugcacgugaccuacgugcccgcccaggagaagaacuucaccaccgccccagccaucugccacgacggcaaggcccacuuuccccgggagggcguguucgugagcaacggcacccacugguucgugacccagcggaacuucuacgagccccagaucaucaccaccgacaacaccuucgugagcggcaacugcgacguggugaucggcaucgugaacaacaccguguacgauccccugcagcccgagcuggacagcuucaaggaggagcuggacaaguacuucaagaaucacaccagccccgacguggaccugggcgacaucagcggcaucaacgccagcguggugaacauccagaaggagaucgaucggcugaacgagguggccaagaaccugaacgagagccugaucgaccugcaggagcugggcaaguacgagcaguacaucaaguggcccugguacaucuggcugggcuucaucgccggccugaucgccaucgugauggugaccaucaugcugugcugcaugaccagcugcugcagcugccugaagggcuguugcagcugcggcagcugcugcaaguucgacgaggacgacagcgagcccgugcugaagggcgugugauaauaggcuggagccucgguggccuagcuucuugccccuugggccuccccccagccccuccuccccuuccugcacccguacccccguggucuuugaauaaagucugagugggcggc

SEQ ID NO: 25 - RNA, 3804 nt, Artificial Sequence
  Synthetic
auguucguguuccuggugcugcugccccuggugagcagccagugcgugaaccugaccacccggacccagcugccaccagccuacaccaacagcuucacccggggcgucuacuaccccgacaagguguuccggagcagcguccugcacagcacccaggaccuguuccugcccuucuucagcaacgugaccugguuccacgccauccacgugagcggcaccaacggcaccaagcgguucgacaaccccgugcugcccuucaacgacggcguguacuucgccagcaccgagaagagcaacaucauccggggcuggaucuucggcaccacccuggacagcaagacccagagccugcugaucgugaauaacgccaccaacguggugaucaaggugugcgaguuccaguucugcaacgaccccuuccugggcguguacuaccacaagaacaacaagagcuggauggagagcgaguuccggguguacagcagcgccaacaacugcaccuucgaguacgugagccagcccuuccugauggaccuggagggcaagcagggcaacuucaagaaccugcgggaguucguguucaagaacaucgacggcuacuucaagaucuacagcaagcacaccccaaucaaccuggugcgggaucugccccagggcuucucagcccuggagccccugguggaccugcccaucggcaucaacaucacccgguuccagacccugcuggcccugcaccggagcuaccugaccccaggcgacagcagcagcggguggacagcaggcgcggcugcuuacuacgugggcuaccugcagccccggaccuuccugcugaaguacaacgagaacggcaccaucaccgacgccguggacugcgcccuggacccucugagcgagaccaagugcacccugaagagcuucaccguggagaagggcaucuaccagaccagcaacuuccgggugcagcccaccgagagcaucgugcgguuccccaacaucaccaaccugugccccuucggcgagguguucaacgccacccgguucgccagcguguacgccuggaaccggaagcggaucagcaacugcguggccgacuacagcgugcuguacaacagcgccagcuucagcaccuucaagugcuacggcgugagccccaccaagcugaacgaccugugcuucaccaacguguacgccgacagcuucgugauccguggcgacgaggugcggcagaucgcacccggccagacaggcaagaucgccgacuacaacuacaagcugcccgacgacuucaccggcugcgugaucgccuggaacagcaacaaccucgacagcaaggugggcggcaacuacaacuaccuguaccggcuguuccggaagagcaaccugaagcccuucgagcgggacaucagcaccgagaucuaccaagccggcuccaccccuugcaacggcguggagggcuucaacugcuacuucccucugcagagcuacggcuuccagcccaccaacggcgugggcuaccagcccuaccgggugguggugcugagcuucgagcugcugcacgccccagccaccguguguggccccaagaagagcaccaaccuggugaagaacaagugcgugaacuucaacuucaacggccuuaccggcaccggcgugcugaccgagagcaacaagaaauuccugcccuuucagcaguucggccgggacaucgccgacaccaccgacgcugugcgggauccccagacccuggagauccuggacaucaccccuugcagcuucggcggcgugagcgugaucaccccaggcaccaacaccagcaaccagguggccgugcuguaccaggacgugaacugcaccgaggugcccguggccauccacgccgaccagcugacacccaccuggcgggucuacagcaccggcagcaacguguuccagacccgggccgguugccugaucggcgccgagcacgugaacaacagcuacgagugcgacauccccaucggcgccggcaucugugccagcuaccagacccagaccaauucaccccggagggcaaggagcguggccagccagagcaucaucgccuacaccaugagccugggcgccgagaacagcguggccuacagcaacaacagcaucgccauccccaccaacuucaccaucagcgugaccaccgagauucugcccgugagcaugaccaagaccagcguggacugcaccauguacaucugcggcgacagcaccgagugcagcaaccugcugcugcaguacggcagcuucugcacccagcugaaccgggcccugaccggcaucgccguggagcaggacaagaacacccaggagguguucgcccaggugaagcagaucuacaagaccccucccaucaaggacuucggcggcuucaacuucagccagauccugcccgaccccagcaagcccagcaagcggagcuucaucgaggaccugcuguucaacaaggugacccuagccgacgccggcuucaucaagcaguacggcgacugccucggcgacauagccgcccgggaccugaucugcgcccagaaguucaacggccugaccgugcugccuccccugcugaccgacgagaugaucgcccaguacaccagcgcccuguuagccggaaccaucaccagcggcuggacuuucggcgcuggagccgcucugcagauccccuucgccaugcagauggccuaccgguucaacggcaucggcgugacccagaacgugcuguacgagaaccagaagcugaucgccaaccaguucaacagcgccaucggcaagauccaggacagccugagcagcaccgcuagcgcccugggcaagcugcaggacguggugaaccagaacgcccaggcccugaacacccuggugaagcagcugagcagcaacuucggcgccaucagcagcgugcugaacgacauccugagccggcuggacaagguggaggccgaggugcagaucgaccggcugaucacuggccggcugcagagccugcagaccuacgugacccagcagcugauccgggccgccgagauucgggccagcgccaaccuggccgccaccaagaugagcgagugcgugcugggccagagcaagcggguggacuucugcggcaagggcuaccaccugaugagcuuuccccagagcgcaccccacggagugguguuccugcacgugaccuacgugcccgcccaggagaagaacuucaccaccgccccagccaucugccacgacggcaaggcccacuuuccccgggagggcguguucgugagcaacggcacccacugguucgugacccagcggaacuucuacgagccccagaucaucaccaccgacaacaccuucgugagcggcaacugcgacguggugaucggcaucgugaacaacaccguguacgauccccugcagcccgagcuggacagcuucaaggaggagcuggacaaguacuucaagaaucacaccagccccgacguggaccugggcgacaucagcggcaucaacgccagcguggugaacauccagaaggagaucgaucggcugaacgagguggccaagaaccugaacgagagccugaucgaccugcaggagcugggcaaguacgagcaguacaucaaguggcccugguacaucuggcugggcuucaucgccggccugaucgccaucgugauggugaccaucaugcugugcugcaugaccagcugcugcagcugccugaagggcuguugcagcugcggcagcugcugcaaguucgacgaggacgacagcgagcccgugcugaagggcgug

SEQ ID NO: 26 - protein, 1268 aa, Artificial Sequence
  Synthetic
MFVFLVLLPLVSSQCVNLTTRTQLPPAYTNSFTRGVYYPDKVFRSSVLHSTQDLFLPFFSNVTWFHAIHVSGTNGTKRFDNPVLPFNDGVYFASTEKSNIIRGWIFGTTLDSKTQSLLIVNNATNVVIKVCEFQFCNDPFLGVYYHKNNKSWMESEFRVYSSANNCTFEYVSQPFLMDLEGKQGNFKNLREFVFKNIDGYFKIYSKHTPINLVRDLPQGFSALEPLVDLPIGINITRFQTLLALHRSYLTPGDSSSGWTAGAAAYYVGYLQPRTFLLKYNENGTITDAVDCALDPLSETKCTLKSFTVEKGIYQTSNFRVQPTESIVRFPNITNLCPFGEVFNATRFASVYAWNRKRISNCVADYSVLYNSASFSTFKCYGVSPTKLNDLCFTNVYADSFVIRGDEVRQIAPGQTGKIADYNYKLPDDFTGCVIAWNSNNLDSKVGGNYNYLYRLFRKSNLKPFERDISTEIYQAGSTPCNGVEGFNCYFPLQSYGFQPTNGVGYQPYRVVVLSFELLHAPATVCGPKKSTNLVKNKCVNFNFNGLTGTGVLTESNKKFLPFQQFGRDIADTTDAVRDPQTLEILDITPCSFGGVSVITPGTNTSNQVAVLYQDVNCTEVPVAIHADQLTPTWRVYSTGSNVFQTRAGCLIGAEHVNNSYECDIPIGAGICASYQTQTNSPRRARSVASQSIIAYTMSLGAENSVAYSNNSIAIPTNFTISVTTEILPVSMTKTSVDCTMYICGDSTECSNLLLQYGSFCTQLNRALTGIAVEQDKNTQEVFAQVKQIYKTPPIKDFGGFNFSQILPDPSKPSKRSFIEDLLFNKVTLADAGFIKQYGDCLGDIAARDLICAQKFNGLTVLPPLLTDEMIAQYTSALLAGTITSGWTFGAGAALQIPFAMQMAYRFNGIGVTQNVLYENQKLIANQFNSAIGKIQDSLSSTASALGKLQDVVNQNAQALNTLVKQLSSNFGAISSVLNDILSRLDKVEAEVQIDRLITGRLQSLQTYVTQQLIRAAEIRASANLAATKMSECVLGQSKRVDFCGKGYHLMSFPQSAPHGVVFLHVTYVPAQEKNFTTAPAICHDGKAHFPREGVFVSNGTHWFVTQRNFYEPQIITTDNTFVSGNCDVVIGIVNNTVYDPLQPELDSFKEELDKYFKNHTSPDVDLGDISGINASVVNIQKEIDRLNEVAKNLNESLIDLQELGKYEQYIKWPWYIWLGFIAGLIAIVMVTIMLCCMTSCCSCLKGCCSCGSCCKFDEDDSEPVLKGV

SEQ ID NO: 27 - RNA, 3995 nt, Artificial Sequence
  Synthetic
gggaaauaagagagaaaagaagaguaagaagaaauauaagaccccggcgccgccaccauguucguguuccuggugcugcugccccuggugagcagccagugcgugaaccugaccacccggacccagcugccaccagccuacaccaacagcuucacccggggcgucuacuaccccgacaagguguuccggagcagcguccugcacagcacccaggaccuguuccugcccuucuucagcaacgugaccugguuccacgccauccacgugagcggcaccaacggcaccaagcgguucgacaaccccgugcugcccuucaacgacggcguguacuucgccagcaccgagaagagcaacaucauccggggcuggaucuucggcaccacccuggacagcaagacccagagccugcugaucgugaauaacgccaccaacguggugaucaaggugugcgaguuccaguucugcaacgaccccuuccugggcguguacuaccacaagaacaacaagagcuggauggagagcgaguuccggguguacagcagcgccaacaacugcaccuucgaguacgugagccagcccuuccugauggaccuggagggcaagcagggcaacuucaagaaccugcgggaguucguguucaagaacaucgacggcuacuucaagaucuacagcaagcacaccccaaucaaccuggugcgggaucugccccagggcuucucagcccuggagccccugguggaccugcccaucggcaucaacaucacccgguuccagacccugcuggcccugcaccggagcuaccugaccccaggcgacagcagcagcggguggacagcaggcgcggcugcuuacuacgugggcuaccugcagccccggaccuuccugcugaaguacaacgagaacggcaccaucaccgacgccguggacugcgcccuggacccucugagcgagaccaagugcacccugaagagcuucaccguggagaagggcaucuaccagaccagcaacuuccgggugcagcccaccgagagcaucgugcgguuccccaacaucaccaaccugugccccuucggcgagguguucaacgccacccgguucgccagcguguacgccuggaaccggaagcggaucagcaacugcguggccgacuacagcgugcuguacaacagcgccagcuucagcaccuucaagugcuacggcgugagccccaccaagcugaacgaccugugcuucaccaacguguacgccgacagcuucgugauccguggcgacgaggugcggcagaucgcacccggccagacaggcaagaucgccgacuacaacuacaagcugcccgacgacuucaccggcugcgugaucgccuggaacagcaacaaccucgacagcaaggugggcggcaacuacaacuaccuguaccggcuguuccggaagagcaaccugaagcccuucgagcgggacaucagcaccgagaucuaccaagccggcuccaccccuugcaacggcguggagggcuucaacugcuacuucccucugcagagcuacggcuuccagcccaccaacggcgugggcuaccagcccuaccgggugguggugcugagcuucgagcugcugcacgccccagccaccguguguggccccaagaagagcaccaaccuggugaagaacaagugcgugaacuucaacuucaacggccuuaccggcaccggcgugcugaccgagagcaacaagaaauuccugcccuuucagcaguucggccgggacaucgccgacaccaccgacgcugugcgggauccccagacccuggagauccuggacaucaccccuugcagcuucggcggcgugagcgugaucaccccaggcaccaacaccagcaaccagguggccgugcuguaccaggacgugaacugcaccgaggugcccguggccauccacgccgaccagcugacacccaccuggcgggucuacagcaccggcagcaacguguuccagacccgggccgguugccugaucggcgccgagcacgugaacaacagcuacgagugcgacauccccaucggcgccggcaucugugccagcuaccagacccagaccaauucaccccggagggcaaggagcguggccagccagagcaucaucgccuacaccaugagccugggcgccgagaacagcguggccuacagcaacaacagcaucgccauccccaccaacuucaccaucagcgugaccaccgagauucugcccgugagcaugaccaagaccagcguggacugcaccauguacaucugcggcgacagcaccgagugcagcaaccugcugcugcaguacggcagcuucugcacccagcugaaccgggcccugaccggcaucgccguggagcaggacaagaacacccaggagguguucgcccaggugaagcagaucuacaagaccccucccaucaaggacuucggcggcuucaacuucagccagauccugcccgaccccagcaagcccagcaagcggagcuucaucgaggaccugcuguucaacaaggugacccuagccgacgccggcuucaucaagcaguacggcgacugccucggcgacauagccgcccgggaccugaucugcgcccagaaguucaacggccugaccgugcugccuccccugcugaccgacgagaugaucgcccaguacaccagcgcccuguuagccggaaccaucaccagcggcuggacuuucggcgcuggagccgcucugcagauccccuucgccaugcagauggccuaccgguucaacggcaucggcgugacccagaacgugcuguacgagaaccagaagcugaucgccaaccaguucaacagcgccaucggcaagauccaggacagccugagcagcaccgcuagcgcccugggcaagcugcaggacguggugaaccagaacgcccaggcccugaacacccuggugaagcagcugagcagcaacuucggcgccaucagcagcgugcugaacgacauccugagccggcuggacccucccgaggccgaggugcagaucgaccggcugaucacuggccggcugcagagccugcagaccuacgugacccagcagcugauccgggccgccgagauucgggccagcgccaaccuggccgccaccaagaugagcgagugcgugcugggccagagcaagcggguggacuucugcggcaagggcuaccaccugaugagcuuuccccagagcgcaccccacggagugguguuccugcacgugaccuacgugcccgcccaggagaagaacuucaccaccgccccagccaucugccacgacggcaaggcccacuuuccccgggagggcguguucgugagcaacggcacccacugguucgugacccagcggaacuucuacgagccccagaucaucaccaccgacaacaccuucgugagcggcaacugcgacguggugaucggcaucgugaacaacaccguguacgauccccugcagcccgagcuggacagcuucaaggaggagcuggacaaguacuucaagaaucacaccagccccgacguggaccugggcgacaucagcggcaucaacgccagcguggugaacauccagaaggagaucgaucggcugaacgagguggccaagaaccugaacgagagccugaucgaccugcaggagcugggcaaguacgagcaguacaucaaguggcccugguacaucuggcugggcuucaucgccggccugaucgccaucgugauggugaccaucaugcugugcugcaugaccagcugcugcagcugccugaagggcuguugcagcugcggcagcugcugcaaguucgacgaggacgacagcgagcccgugcugaagggcgugaagcugcacuacaccugauaauaggcuggagccucgguggccuagcuucuugccccuugggccuccccccagccccuccuccccuuccugcacccguacccccguggucuuugaauaaagucugagugggcggc

SEQ ID NO: 28 - RNA, 3819 nt, Artificial Sequence
  Synthetic
auguucguguuccuggugcugcugccccuggugagcagccagugcgugaaccugaccacccggacccagcugccaccagccuacaccaacagcuucacccggggcgucuacuaccccgacaagguguuccggagcagcguccugcacagcacccaggaccuguuccugcccuucuucagcaacgugaccugguuccacgccauccacgugagcggcaccaacggcaccaagcgguucgacaaccccgugcugcccuucaacgacggcguguacuucgccagcaccgagaagagcaacaucauccggggcuggaucuucggcaccacccuggacagcaagacccagagccugcugaucgugaauaacgccaccaacguggugaucaaggugugcgaguuccaguucugcaacgaccccuuccugggcguguacuaccacaagaacaacaagagcuggauggagagcgaguuccggguguacagcagcgccaacaacugcaccuucgaguacgugagccagcccuuccugauggaccuggagggcaagcagggcaacuucaagaaccugcgggaguucguguucaagaacaucgacggcuacuucaagaucuacagcaagcacaccccaaucaaccuggugcgggaucugccccagggcuucucagcccuggagccccugguggaccugcccaucggcaucaacaucacccgguuccagacccugcuggcccugcaccggagcuaccugaccccaggcgacagcagcagcggguggacagcaggcgcggcugcuuacuacgugggcuaccugcagccccggaccuuccugcugaaguacaacgagaacggcaccaucaccgacgccguggacugcgcccuggacccucugagcgagaccaagugcacccugaagagcuucaccguggagaagggcaucuaccagaccagcaacuuccgggugcagcccaccgagagcaucgugcgguuccccaacaucaccaaccugugccccuucggcgagguguucaacgccacccgguucgccagcguguacgccuggaaccggaagcggaucagcaacugcguggccgacuacagcgugcuguacaacagcgccagcuucagcaccuucaagugcuacggcgugagccccaccaagcugaacgaccugugcuucaccaacguguacgccgacagcuucgugauccguggcgacgaggugcggcagaucgcacccggccagacaggcaagaucgccgacuacaacuacaagcugcccgacgacuucaccggcugcgugaucgccuggaacagcaacaaccucgacagcaaggugggcggcaacuacaacuaccuguaccggcuguuccggaagagcaaccugaagcccuucgagcgggacaucagcaccgagaucuaccaagccggcuccaccccuugcaacggcguggagggcuucaacugcuacuucccucugcagagcuacggcuuccagcccaccaacggcgugggcuaccagcccuaccgggugguggugcugagcuucgagcugcugcacgccccagccaccguguguggccccaagaagagcaccaaccuggugaagaacaagugcgugaacuucaacuucaacggccuuaccggcaccggcgugcugaccgagagcaacaagaaauuccugcccuuucagcaguucggccgggacaucgccgacaccaccgacgcugugcgggauccccagacccuggagauccuggacaucaccccuugcagcuucggcggcgugagcgugaucaccccaggcaccaacaccagcaaccagguggccgugcuguaccaggacgugaacugcaccgaggugcccguggccauccacgccgaccagcugacacccaccuggcgggucuacagcaccggcagcaacguguuccagacccgggccgguugccugaucggcgccgagcacgugaacaacagcuacgagugcgacauccccaucggcgccggcaucugugccagcuaccagacccagaccaauucaccccggagggcaaggagcguggccagccagagcaucaucgccuacaccaugagccugggcgccgagaacagcguggccuacagcaacaacagcaucgccauccccaccaacuucaccaucagcgugaccaccgagauucugcccgugagcaugaccaagaccagcguggacugcaccauguacaucugcggcgacagcaccgagugcagcaaccugcugcugcaguacggcagcuucugcacccagcugaaccgggcccugaccggcaucgccguggagcaggacaagaacacccaggagguguucgcccaggugaagcagaucuacaagaccccucccaucaaggacuucggcggcuucaacuucagccagauccugcccgaccccagcaagcccagcaagcggagcuucaucgaggaccugcuguucaacaaggugacccuagccgacgccggcuucaucaagcaguacggcgacugccucggcgacauagccgcccgggaccugaucugcgcccagaaguucaacggccugaccgugcugccuccccugcugaccgacgagaugaucgcccaguacaccagcgcccuguuagccggaaccaucaccagcggcuggacuuucggcgcuggagccgcucugcagauccccuucgccaugcagauggccuaccgguucaacggcaucggcgugacccagaacgugcuguacgagaaccagaagcugaucgccaaccaguucaacagcgccaucggcaagauccaggacagccugagcagcaccgcuagcgcccugggcaagcugcaggacguggugaaccagaacgcccaggcccugaacacccuggugaagcagcugagcagcaacuucggcgccaucagcagcgugcugaacgacauccugagccggcuggacccucccgaggccgaggugcagaucgaccggcugaucacuggccggcugcagagccugcagaccuacgugacccagcagcugauccgggccgccgagauucgggccagcgccaaccuggccgccaccaagaugagcgagugcgugcugggccagagcaagcggguggacuucugcggcaagggcuaccaccugaugagcuuuccccagagcgcaccccacggagugguguuccugcacgugaccuacgugcccgcccaggagaagaacuucaccaccgccccagccaucugccacgacggcaaggcccacuuuccccgggagggcguguucgugagcaacggcacccacugguucgugacccagcggaacuucuacgagccccagaucaucaccaccgacaacaccuucgugagcggcaacugcgacguggugaucggcaucgugaacaacaccguguacgauccccugcagcccgagcuggacagcuucaaggaggagcuggacaaguacuucaagaaucacaccagccccgacguggaccugggcgacaucagcggcaucaacgccagcguggugaacauccagaaggagaucgaucggcugaacgagguggccaagaaccugaacgagagccugaucgaccugcaggagcugggcaaguacgagcaguacaucaaguggcccugguacaucuggcugggcuucaucgccggccugaucgccaucgugauggugaccaucaugcugugcugcaugaccagcugcugcagcugccugaagggcuguugcagcugcggcagcugcugcaaguucgacgaggacgacagcgagcccgugcugaagggcgugaagcugcacuacacc

SEQ ID NO: 29 - protein, 1273 aa, Artificial Sequence; identical to SEQ ID NO: 5
  Synthetic

SEQ ID NO: 30 - RNA, 3995 nt, Artificial Sequence
  Synthetic
gggaaauaagagagaaaagaagaguaagaagaaauauaagaccccggcgccgccaccauguucguguuccuggugcugcugccccuggugagcagccagugcgugaaccugaccacccggacccagcugccaccagccuacaccaacagcuucacccggggcgucuacuaccccgacaagguguuccggagcagcguccugcacagcacccaggaccuguuccugcccuucuucagcaacgugaccugguuccacgccauccacgugagcggcaccaacggcaccaagcgguucgacaaccccgugcugcccuucaacgacggcguguacuucgccagcaccgagaagagcaacaucauccggggcuggaucuucggcaccacccuggacagcaagacccagagccugcugaucgugaauaacgccaccaacguggugaucaaggugugcgaguuccaguucugcaacgaccccuuccugggcguguacuaccacaagaacaacaagagcuggauggagagcgaguuccggguguacagcagcgccaacaacugcaccuucgaguacgugagccagcccuuccugauggaccuggagggcaagcagggcaacuucaagaaccugcgggaguucguguucaagaacaucgacggcuacuucaagaucuacagcaagcacaccccaaucaaccuggugcgggaucugccccagggcuucucagcccuggagccccugguggaccugcccaucggcaucaacaucacccgguuccagacccugcuggcccugcaccggagcuaccugaccccaggcgacagcagcagcggguggacagcaggcgcggcugcuuacuacgugggcuaccugcagccccggaccuuccugcugaaguacaacgagaacggcaccaucaccgacgccguggacugcgcccuggacccucugagcgagaccaagugcacccugaagagcuucaccguggagaagggcaucuaccagaccagcaacuuccgggugcagcccaccgagagcaucgugcgguuccccaacaucaccaaccugugccccuucggcgagguguucaacgccacccgguucgccagcguguacgccuggaaccggaagcggaucagcaacugcguggccgacuacagcgugcuguacaacagcgccagcuucagcaccuucaagugcuacggcgugagccccaccaagcugaacgaccugugcuucaccaacguguacgccgacagcuucgugauccguggcgacgaggugcggcagaucgcacccggccagacaggcaagaucgccgacuacaacuacaagcugcccgacgacuucaccggcugcgugaucgccuggaacagcaacaaccucgacagcaaggugggcggcaacuacaacuaccuguaccggcuguuccggaagagcaaccugaagcccuucgagcgggacaucagcaccgagaucuaccaagccggcuccaccccuugcaacggcguggagggcuucaacugcuacuucccucugcagagcuacggcuuccagcccaccaacggcgugggcuaccagcccuaccgggugguggugcugagcuucgagcugcugcacgccccagccaccguguguggccccaagaagagcaccaaccuggugaagaacaagugcgugaacuucaacuucaacggccuuaccggcaccggcgugcugaccgagagcaacaagaaauuccugcccuuucagcaguucggccgggacaucgccgacaccaccgacgcugugcgggauccccagacccuggagauccuggacaucaccccuugcagcuucggcggcgugagcgugaucaccccaggcaccaacaccagcaaccagguggccgugcuguaccaggacgugaacugcaccgaggugcccguggccauccacgccgaccagcugacacccaccuggcgggucuacagcaccggcagcaacguguuccagacccgggccgguugccugaucggcgccgagcacgugaacaacagcuacgagugcgacauccccaucggcgccggcaucugugccagcuaccagacccagaccaauucaccccggagggcaaggagcguggccagccagagcaucaucgccuacaccaugagccugggcgccgagaacagcguggccuacagcaacaacagcaucgccauccccaccaacuucaccaucagcgugaccaccgagauucugcccgugagcaugaccaagaccagcguggacugcaccauguacaucugcggcgacagcaccgagugcagcaaccugcugcugcaguacggcagcuucugcacccagcugaaccgggcccugaccggcaucgccguggagcaggacaagaacacccaggagguguucgcccaggugaagcagaucuacaagaccccucccaucaaggacuucggcggcuucaacuucagccagauccugcccgaccccagcaagcccagcaagcggagcuucaucgaggaccugcuguucaacaaggugacccuagccgacgccggcuucaucaagcaguacggcgacugccucggcgacauagccgcccgggaccugaucugcgcccagaaguucaacggccugaccgugcugccuccccugcugaccgacgagaugaucgcccaguacaccagcgcccuguuagccggaaccaucaccagcggcuggacuuucggcgcuggagccgcucugcagauccccuucgccaugcagauggccuaccgguucaacggcaucggcgugacccagaacgugcuguacgagaaccagaagcugaucgccaaccaguucaacagcgccaucggcaagauccaggacagccugagcagcaccgcuagcgcccugggcaagcugcaggacguggugaaccagaacgcccaggcccugaacacccuggugaagcagcugagcagcaacuucggcgccaucagcagcgugcugaacgacauccugagccggcuggacaagguggaggccgaggugcagaucgaccggcugaucacuggccggcugcagagccugcagaccuacgugacccagcagcugauccgggccgccgagauucgggccagcgccaaccuggccgccaccaagaugagcgagugcgugcugggccagagcaagcggguggacuucugcggcaagggcuaccaccugaugagcuuuccccagagcgcaccccacggagugguguuccugcacgugaccuacgugcccgcccaggagaagaacuucaccaccgccccagccaucugccacgacggcaaggcccacuuuccccgggagggcguguucgugagcaacggcacccacugguucgugacccagcggaacuucuacgagccccagaucaucaccaccgacaacaccuucgugagcggcaacugcgacguggugaucggcaucgugaacaacaccguguacgauccccugcagcccgagcuggacagcuucaaggaggagcuggacaaguacuucaagaaucacaccagccccgacguggaccugggcgacaucagcggcaucaacgccagcguggugaacauccagaaggagaucgaucggcugaacgagguggccaagaaccugaacgagagccugaucgaccugcaggagcugggcaaguacgagcaguacaucaaguggcccugguacaucuggcugggcuucaucgccggccugaucgccaucgugauggugaccaucaugcugugcugcaugaccagcugcugcagcugccugaagggcuguugcagcugcggcagcugcugcaaguucgacgaggacgacagcgagcccgugcugaagggcgugaagcugcacuacaccugauaauaggcuggagccucgguggccuagcuucuugccccuugggccuccccccagccccuccuccccuuccugcacccguacccccguggucuuugaauaaagucugagugggcggc

SEQ ID NO: 31 - RNA, 3819 nt, Artificial Sequence
  Synthetic
auguucguguuccuggugcugcugccccuggugagcagccagugcgugaaccugaccacccggacccagcugccaccagccuacaccaacagcuucacccggggcgucuacuaccccgacaagguguuccggagcagcguccugcacagcacccaggaccuguuccugcccuucuucagcaacgugaccugguuccacgccauccacgugagcggcaccaacggcaccaagcgguucgacaaccccgugcugcccuucaacgacggcguguacuucgccagcaccgagaagagcaacaucauccggggcuggaucuucggcaccacccuggacagcaagacccagagccugcugaucgugaauaacgccaccaacguggugaucaaggugugcgaguuccaguucugcaacgaccccuuccugggcguguacuaccacaagaacaacaagagcuggauggagagcgaguuccggguguacagcagcgccaacaacugcaccuucgaguacgugagccagcccuuccugauggaccuggagggcaagcagggcaacuucaagaaccugcgggaguucguguucaagaacaucgacggcuacuucaagaucuacagcaagcacaccccaaucaaccuggugcgggaucugccccagggcuucucagcccuggagccccugguggaccugcccaucggcaucaacaucacccgguuccagacccugcuggcccugcaccggagcuaccugaccccaggcgacagcagcagcggguggacagcaggcgcggcugcuuacuacgugggcuaccugcagccccggaccuuccugcugaaguacaacgagaacggcaccaucaccgacgccguggacugcgcccuggacccucugagcgagaccaagugcacccugaagagcuucaccguggagaagggcaucuaccagaccagcaacuuccgggugcagcccaccgagagcaucgugcgguuccccaacaucaccaaccugugccccuucggcgagguguucaacgccacccgguucgccagcguguacgccuggaaccggaagcggaucagcaacugcguggccgacuacagcgugcuguacaacagcgccagcuucagcaccuucaagugcuacggcgugagccccaccaagcugaacgaccugugcuucaccaacguguacgccgacagcuucgugauccguggcgacgaggugcggcagaucgcacccggccagacaggcaagaucgccgacuacaacuacaagcugcccgacgacuucaccggcugcgugaucgccuggaacagcaacaaccucgacagcaaggugggcggcaacuacaacuaccuguaccggcuguuccggaagagcaaccugaagcccuucgagcgggacaucagcaccgagaucuaccaagccggcuccaccccuugcaacggcguggagggcuucaacugcuacuucccucugcagagcuacggcuuccagcccaccaacggcgugggcuaccagcccuaccgggugguggugcugagcuucgagcugcugcacgccccagccaccguguguggccccaagaagagcaccaaccuggugaagaacaagugcgugaacuucaacuucaacggccuuaccggcaccggcgugcugaccgagagcaacaagaaauuccugcccuuucagcaguucggccgggacaucgccgacaccaccgacgcugugcgggauccccagacccuggagauccuggacaucaccccuugcagcuucggcggcgugagcgugaucaccccaggcaccaacaccagcaaccagguggccgugcuguaccaggacgugaacugcaccgaggugcccguggccauccacgccgaccagcugacacccaccuggcgggucuacagcaccggcagcaacguguuccagacccgggccgguugccugaucggcgccgagcacgugaacaacagcuacgagugcgacauccccaucggcgccggcaucugugccagcuaccagacccagaccaauucaccccggagggcaaggagcguggccagccagagcaucaucgccuacaccaugagccugggcgccgagaacagcguggccuacagcaacaacagcaucgccauccccaccaacuucaccaucagcgugaccaccgagauucugcccgugagcaugaccaagaccagcguggacugcaccauguacaucugcggcgacagcaccgagugcagcaaccugcugcugcaguacggcagcuucugcacccagcugaaccgggcccugaccggcaucgccguggagcaggacaagaacacccaggagguguucgcccaggugaagcagaucuacaagaccccucccaucaaggacuucggcggcuucaacuucagccagauccugcccgaccccagcaagcccagcaagcggagcuucaucgaggaccugcuguucaacaaggugacccuagccgacgccggcuucaucaagcaguacggcgacugccucggcgacauagccgcccgggaccugaucugcgcccagaaguucaacggccugaccgugcugccuccccugcugaccgacgagaugaucgcccaguacaccagcgcccuguuagccggaaccaucaccagcggcuggacuuucggcgcuggagccgcucugcagauccccuucgccaugcagauggccuaccgguucaacggcaucggcgugacccagaacgugcuguacgagaaccagaagcugaucgccaaccaguucaacagcgccaucggcaagauccaggacagccugagcagcaccgcuagcgcccugggcaagcugcaggacguggugaaccagaacgcccaggcccugaacacccuggugaagcagcugagcagcaacuucggcgccaucagcagcgugcugaacgacauccugagccggcuggacaagguggaggccgaggugcagaucgaccggcugaucacuggccggcugcagagccugcagaccuacgugacccagcagcugauccgggccgccgagauucgggccagcgccaaccuggccgccaccaagaugagcgagugcgugcugggccagagcaagcggguggacuucugcggcaagggcuaccaccugaugagcuuuccccagagcgcaccccacggagugguguuccugcacgugaccuacgugcccgcccaggagaagaacuucaccaccgccccagccaucugccacgacggcaaggcccacuuuccccgggagggcguguucgugagcaacggcacccacugguucgugacccagcggaacuucuacgagccccagaucaucaccaccgacaacaccuucgugagcggcaacugcgacguggugaucggcaucgugaacaacaccguguacgauccccugcagcccgagcuggacagcuucaaggaggagcuggacaaguacuucaagaaucacaccagccccgacguggaccugggcgacaucagcggcaucaacgccagcguggugaacauccagaaggagaucgaucggcugaacgagguggccaagaaccugaacgagagccugaucgaccugcaggagcugggcaaguacgagcaguacaucaaguggcccugguacaucuggcugggcuucaucgccggccugaucgccaucgugauggugaccaucaugcugugcugcaugaccagcugcugcagcugccugaagggcuguugcagcugcggcagcugcugcaaguucgacgaggacgacagcgagcccgugcugaagggcgugaagcugcacuacacc

SEQ ID NO: 32 - protein, 1273 aa, Artificial Sequence
  Synthetic
MFVFLVLLPLVSSQCVNLTTRTQLPPAYTNSFTRGVYYPDKVFRSSVLHSTQDLFLPFFSNVTWFHAIHVSGTNGTKRFDNPVLPFNDGVYFASTEKSNIIRGWIFGTTLDSKTQSLLIVNNATNVVIKVCEFQFCNDPFLGVYYHKNNKSWMESEFRVYSSANNCTFEYVSQPFLMDLEGKQGNFKNLREFVFKNIDGYFKIYSKHTPINLVRDLPQGFSALEPLVDLPIGINITRFQTLLALHRSYLTPGDSSSGWTAGAAAYYVGYLQPRTFLLKYNENGTITDAVDCALDPLSETKCTLKSFTVEKGIYQTSNFRVQPTESIVRFPNITNLCPFGEVFNATRFASVYAWNRKRISNCVADYSVLYNSASFSTFKCYGVSPTKLNDLCFTNVYADSFVIRGDEVRQIAPGQTGKIADYNYKLPDDFTGCVIAWNSNNLDSKVGGNYNYLYRLFRKSNLKPFERDISTEIYQAGSTPCNGVEGFNCYFPLQSYGFQPTNGVGYQPYRVVVLSFELLHAPATVCGPKKSTNLVKNKCVNFNFNGLTGTGVLTESNKKFLPFQQFGRDIADTTDAVRDPQTLEILDITPCSFGGVSVITPGTNTSNQVAVLYQDVNCTEVPVAIHADQLTPTWRVYSTGSNVFQTRAGCLIGAEHVNNSYECDIPIGAGICASYQTQTNSPRRARSVASQSIIAYTMSLGAENSVAYSNNSIAIPTNFTISVTTEILPVSMTKTSVDCTMYICGDSTECSNLLLQYGSFCTQLNRALTGIAVEQDKNTQEVFAQVKQIYKTPPIKDFGGFNFSQILPDPSKPSKRSFIEDLLFNKVTLADAGFIKQYGDCLGDIAARDLICAQKFNGLTVLPPLLTDEMIAQYTSALLAGTITSGWTFGAGAALQIPFAMQMAYRFNGIGVTQNVLYENQKLIANQFNSAIGKIQDSLSSTASALGKLQDVVNQNAQALNTLVKQLSSNFGAISSVLNDILSRLDKVEAEVQIDRLITGRLQSLQTYVTQQLIRAAEIRASANLAATKMSECVLGQSKRVDFCGKGYHLMSFPQSAPHGVVFLHVTYVPAQEKNFTTAPAICHDGKAHFPREGVFVSNGTHWFVTQRNFYEPQIITTDNTFVSGNCDVVIGIVNNTVYDPLQPELDSFKEELDKYFKNHTSPDVDLGDISGINASVVNIQKEIDRLNEVAKNLNESLIDLQELGKYEQYIKWPWYIWLGFIAGLIAIVMVTIMLCCMTSCCSCLKGCCSCGSCCKFDEDDSEPVLKGVKLHYT

SEQ ID NO: 33 - protein, 1260 aa, Artificial Sequence
  Synthetic
MFVFLVLLPLVSSQCVNLTTRTQLPPAYTNSFTRGVYYPDKVFRSSVLHSTQDLFLPFFSNVTWFHAIHVSGTNGTKRFDNPVLPFNDGVYFASTEKSNIIRGWIFGTTLDSKTQSLLIVNNATNVVIKVCEFQFCNDPFLGVYYHKNNKSWMESEFRVYSSANNCTFEYVSQPFLMDLEGKQGNFKNLREFVFKNIDGYFKIYSKHTPINLVRDLPQGFSALEPLVDLPIGINITRFQTLLALHRSYLTPGDSSSGWTAGAAAYYVGYLQPRTFLLKYNENGTITDAVDCALDPLSETKCTLKSFTVEKGIYQTSNFRVQPTESIVRFPNITNLCPFGEVFNATRFASVYAWNRKRISNCVADYSVLYNSASFSTFKCYGVSPTKLNDLCFTNVYADSFVIRGDEVRQIAPGQTGKIADYNYKLPDDFTGCVIAWNSNNLDSKVGGNYNYLYRLFRKSNLKPFERDISTEIYQAGSTPCNGVEGFNCYFPLQSYGFQPTNGVGYQPYRVVVLSFELLHAPATVCGPKKSTNLVKNKCVNFNFNGLTGTGVLTESNKKFLPFQQFGRDIADTTDAVRDPQTLEILDITPCSFGGVSVITPGTNTSNQVAVLYQDVNCTEVPVAIHADQLTPTWRVYSTGSNVFQTRAGCLIGAEHVNNSYECDIPIGAGICASYQTQTNSPRRARSVASQSIIAYTMSLGAENSVAYSNNSIAIPTNFTISVTTEILPVSMTKTSVDCTMYICGDSTECSNLLLQYGSFCTQLNRALTGIAVEQDKNTQEVFAQVKQIYKTPPIKDFGGFNFSQILPDPSKPSKRSFIEDLLFNKVTLADAGFIKQYGDCLGDIAARDLICAQKFNGLTVLPPLLTDEMIAQYTSALLAGTITSGWTFGAGAALQIPFAMQMAYRFNGIGVTQNVLYENQKLIANQFNSAIGKIQDSLSSTASALGKLQDVVNQNAQALNTLVKQLSSNFGAISSVLNDILSRLDKVEAEVQIDRLITGRLQSLQTYVTQQLIRAAEIRASANLAATKMSECVLGQSKRVDFCGKGYHLMSFPQSAPHGVVFLHVTYVPAQEKNFTTAPAICHDGKAHFPREGVFVSNGTHWFVTQRNFYEPQIITTDNTFVSGNCDVVIGIVNNTVYDPLQPELDSFKEELDKYFKNHTSPDVDLGDISGINASVVNIQKEIDRLNEVAKNLNESLIDLQELGKYEQYIKWPWYIWLGFIAGLIAIVMVTIMLCCMTSCCSCLKGCCSCGSCCKFDEDD

SEQ ID NO: 34 - protein, 1260 aa, Artificial Sequence
  Synthetic
MFVFLVLLPLVSSQCVNLTTRTQLPPAYTNSFTRGVYYPDKVFRSSVLHSTQDLFLPFFSNVTWFHAIHVSGTNGTKRFDNPVLPFNDGVYFASTEKSNIIRGWIFGTTLDSKTQSLLIVNNATNVVIKVCEFQFCNDPFLGVYYHKNNKSWMESEFRVYSSANNCTFEYVSQPFLMDLEGKQGNFKNLREFVFKNIDGYFKIYSKHTPINLVRDLPQGFSALEPLVDLPIGINITRFQTLLALHRSYLTPGDSSSGWTAGAAAYYVGYLQPRTFLLKYNENGTITDAVDCALDPLSETKCTLKSFTVEKGIYQTSNFRVQPTESIVRFPNITNLCPFGEVFNATRFASVYAWNRKRISNCVADYSVLYNSASFSTFKCYGVSPTKLNDLCFTNVYADSFVIRGDEVRQIAPGQTGKIADYNYKLPDDFTGCVIAWNSNNLDSKVGGNYNYLYRLFRKSNLKPFERDISTEIYQAGSTPCNGVEGFNCYFPLQSYGFQPTNGVGYQPYRVVVLSFELLHAPATVCGPKKSTNLVKNKCVNFNFNGLTGTGVLTESNKKFLPFQQFGRDIADTTDAVRDPQTLEILDITPCSFGGVSVITPGTNTSNQVAVLYQDVNCTEVPVAIHADQLTPTWRVYSTGSNVFQTRAGCLIGAEHVNNSYECDIPIGAGICASYQTQTNSPRRARSVASQSIIAYTMSLGAENSVAYSNNSIAIPTNFTISVTTEILPVSMTKTSVDCTMYICGDSTECSNLLLQYGSFCTQLNRALTGIAVEQDKNTQEVFAQVKQIYKTPPIKDFGGFNFSQILPDPSKPSKRSFIEDLLFNKVTLADAGFIKQYGDCLGDIAARDLICAQKFNGLTVLPPLLTDEMIAQYTSALLAGTITSGWTFGAGAALQIPFAMQMAYRFNGIGVTQNVLYENQKLIANQFNSAIGKIQDSLSSTASALGKLQDVVNQNAQALNTLVKQLSSNFGAISSVLNDILSRLDPPEAEVQIDRLITGRLQSLQTYVTQQLIRAAEIRASANLAATKMSECVLGQSKRVDFCGKGYHLMSFPQSAPHGVVFLHVTYVPAQEKNFTTAPAICHDGKAHFPREGVFVSNGTHWFVTQRNFYEPQIITTDNTFVSGNCDVVIGIVNNTVYDPLQPELDSFKEELDKYFKNHTSPDVDLGDISGINASVVNIQKEIDRLNEVAKNLNESLIDLQELGKYEQYIKWPWYIWLGFIAGLIAIVMVTIMLCCMTSCCSCLKGCCSCGSCCKFDEDD

SEQ ID NO: 35 - protein, 1260 aa, Artificial Sequence
  Synthetic
MFVFLVLLPLVSSQCVNLTTRTQLPPAYTNSFTRGVYYPDKVFRSSVLHSTQDLFLPFFSNVTWFHAIHVSGTNGTKRFDNPVLPFNDGVYFASTEKSNIIRGWIFGTTLDSKTQSLLIVNNATNVVIKVCEFQFCNDPFLGVYYHKNNKSWMESEFRVYSSANNCTFEYVSQPFLMDLEGKQGNFKNLREFVFKNIDGYFKIYSKHTPINLVRDLPQGFSALEPLVDLPIGINITRFQTLLALHRSYLTPGDSSSGWTAGAAAYYVGYLQPRTFLLKYNENGTITDAVDCALDPLSETKCTLKSFTVEKGIYQTSNFRVQPTESIVRFPNITNLCPFGEVFNATRFASVYAWNRKRISNCVADYSVLYNSASFSTFKCYGVSPTKLNDLCFTNVYADSFVIRGDEVRQIAPGQTGKIADYNYKLPDDFTGCVIAWNSNNLDSKVGGNYNYLYRLFRKSNLKPFERDISTEIYQAGSTPCNGVEGFNCYFPLQSYGFQPTNGVGYQPYRVVVLSFELLHAPATVCGPKKSTNLVKNKCVNFNFNGLTGTGVLTESNKKFLPFQQFGRDIADTTDAVRDPQTLEILDITPCSFGGVSVITPGTNTSNQVAVLYQDVNCTEVPVAIHADQLTPTWRVYSTGSNVFQTRAGCLIGAEHVNNSYECDIPIGAGICASYQTQTNSPGSGGSVASQSIIAYTMSLGAENSVAYSNNSIAIPTNFTISVTTEILPVSMTKTSVDCTMYICGDSTECSNLLLQYGSFCTQLNRALTGIAVEQDKNTQEVFAQVKQIYKTPPIKDFGGFNFSQILPDPSKPSKRSFIEDLLFNKVTLADAGFIKQYGDCLGDIAARDLICAQKFNGLTVLPPLLTDEMIAQYTSALLAGTITSGWTFGAGAALQIPFAMQMAYRFNGIGVTQNVLYENQKLIANQFNSAIGKIQDSLSSTASALGKLQDVVNQNAQALNTLVKQLSSNFGAISSVLNDILSRLDPPEAEVQIDRLITGRLQSLQTYVTQQLIRAAEIRASANLAATKMSECVLGQSKRVDFCGKGYHLMSFPQSAPHGVVFLHVTYVPAQEKNFTTAPAICHDGKAHFPREGVFVSNGTHWFVTQRNFYEPQIITTDNTFVSGNCDVVIGIVNNTVYDPLQPELDSFKEELDKYFKNHTSPDVDLGDISGINASVVNIQKEIDRLNEVAKNLNESLIDLQELGKYEQYIKWPWYIWLGFIAGLIAIVMVTIMLCCMTSCCSCLKGCCSCGSCCKFDEDD

SEQ ID NO: 36 - RNA, 47 nt, Artificial Sequence
  Synthetic
gggaaauaagagagaaaagaagaguaagaagaaauauaagagccacc

SEQ ID NO: 37 - RNA, 119 nt, Artificial Sequence
  Synthetic
ugauaauaggcuggagccucgguggccaugcuucuugccccuugggccuccccccagccccuccuccccuuccugcacccguacccccguggucuuugaauaaagucugagugggcggc

SEQ ID NO: 38 - protein, 30 aa, Artificial Sequence
  Synthetic
MDSKGSSQKGSRLLLLLVVSNLLLPQGVVG

SEQ ID NO: 39 - protein, 18 aa, Artificial Sequence
  Synthetic
MDWTWILFLVAAATRVHS

SEQ ID NO: 40 - protein, 20 aa, Artificial Sequence
  Synthetic
METPAQLLFLLLLWLPDTTG

SEQ ID NO: 41 - protein, 24 aa, Artificial Sequence
  Synthetic
MLGSNSGQRVVFTILLLLVAPAYS

SEQ ID NO: 42 - protein, 17 aa, Artificial Sequence
  Synthetic
MKCLLYLAFLFIGVNCA

SEQ ID NO: 43 - protein, 15 aa, Artificial Sequence
  Synthetic
MWLVSLAIVTACAGA

SEQ ID NO: 44 - RNA, 9 nt, Artificial Sequence
  Synthetic
ccrccaugg

SEQ ID NO: 45 - RNA, 11 nt, Artificial Sequence
  Synthetic
gggauccuacc

SEQ ID NO: 46 - RNA, 9 nt, Artificial Sequence
  Synthetic
uuauuuaww

SEQ ID NO: 47 - protein, 1255 aa, Artificial Sequence
  Synthetic
MFIFLFFLTLTSGSDLESCTTFDDVQAPNYPQHSSSRRGVYYPDEIFRSDTLYLTQDLFLPFYSNVTGFHTINHRFDNPVIPFKDGVYFAATEKSNVVRGWVFGSTMNNKSQSVIIINNSTNVVIRACNFELCDNPFFAVSKPTGTQTHTMIFDNAFNCTFEYISDSFSLDVAEKSGNFKHLREFVFKNKDGFLYVYKGYQPIDVVRDLPSGFNILKPIFKLPLGINITNFRAILTAFLPAQDTWGTSAAAYFVGYLKPATFMLKYDENGTITDAVDCSQNPLAELKCSVKSFEIDKGIYQTSNFRVAPSKEVVRFPNITNLCPFGEVFNATTFPSVYAWERKRISNCVADYSVLYNSTSFSTFKCYGVSATKLNDLCFSNVYADSFVVKGDDVRQIAPGQTGVIADYNYKLPDDFTGCVLAWNTRNIDATQTGNYNYKYRSLRHGKLRPFERDISNVPFSPDGKPCTPPAFNCYWPLNDYGFYITNGIGYQPYRVVVLSFELLNAPATVCGPKLSTDLIKNQCVNFNFNGLTGTGVLTPSSKRFQPFQQFGRDVLDFTDSVRDPKTSEILDISPCSFGGVSVITPGTNTSSEVAVLYQDVNCTDVPVAIHADQLTPSWRVYSTGNNVFQTQAGCLIGAEHVDTSYECDIPIGAGICASYHTVSSLRSTSQKSIVAYTMSLGADSSIAYSNNTIAIPTNFSISITTEVMPVSMAKTSVDCNMYICGDSTECANLLLQYGSFCTQLNRALSGIAVEQDRNTREVFAQVKQMYKTPTLKDFGGFNFSQILPDPLKPTKRSFIEDLLFNKVTLADAGFMKQYGECLGDINARDLICAQKFNGLTVLPPLLTDDMIAAYTAALVSGTATAGWTFGAGAALQIPFAMQMAYRFNGIGVTQNVLYENQKQIANQFNKAISQIQESLTTTSTALGKLQDVVNQNAQALNTLVKQLSSNFGAISSVLNDILSRLDKVEAEVQIDRLITGRLQSLQTYVTQQLIRAAEIRASANLAATKMSECVLGQSKRVDFCGKGYHLMSFPQAAPHGVVFLHVTYVPSQERNFTTAPAICHEGKAYFPREGVFVFNGTSWFITQRNFFSPQIITTDNTFVSGSCDVVIGIINNTVYDPLQPELDSFKEELDKYFKNHTSPDVDLGDISGINASVVNIQKEIDRLNEVAKNLNESLIDLQELGKYEQYIKWPWYVWLGFIAGLIAIVMVTILLCCMTSCCSCLKGACSCGSCCKFDEDDSEPVLKGVKLHYT

SEQ ID NO: 48 - RNA, 3765 nt, Artificial Sequence
  Synthetic
auguuuaucuuccuguucuuccugacccugaccagcggcagcgaccuggaaagcugcaccaccuucgacgacgugcaggcccccaacuacccucagcacagcucuagcagacggggcguguacuaccccgacgagaucuucagaagcgacacccuguaccugacccaggaccuguuccugcccuucuacagcaacgugaccggcuuccacaccaucaaccacagauucgacaaccccgugauccccuucaaggacgggguguacuuugccgccaccgagaaguccaaugucgugcggggauggguguucggcagcaccaugaacaacaagagccagagcgugaucaucaucaacaacagcaccaacgucgugauccgggccugcaacuucgagcugugcgacaacccauucuucgccguguccaagcccaccggcacccagacccacaccaugaucuucgacaacgccuucaacugcaccuucgaguacaucagcgacagcuucagccuggacguggccgagaaaagcggcaacuucaagcaccugagagaauucguguucaagaacaaggacggcuuccuguacguguacaagggcuaccagcccaucgacgucgugcgcgaucugcccagcggcuucaacauccugaagcccaucuucaagcugccccugggcaucaacaucaccaacuuccgggcuauccugaccgccuuccugcccgcccaggauaccuggggaacaagcgccgcugccuacuucgugggcuaccugaagccugccaccuucaugcugaaguacgacgagaacggcaccaucaccgacgccguggacugcagccagaauccucuggccgagcugaagugcagcgugaaguccuucgagaucgacaagggcaucuaccagaccagcaacuucagaguggcccccagcaaagaagucgugcgguuccccaauaucaccaaccugugccccuucggcgagguguucaacgccaccaccuuucccagcguguacgccugggagcggaagcggaucagcaacugcguggccgacuacagcgugcuguacaacuccaccagcuucuccaccuucaagugcuacggcguguccgccaccaagcugaacgaccugugcuucagcaauguguacgccgacuccuucgucgugaagggcgacgaugugcgccagaucgccccuggacagacaggcgugaucgccgauuacaacuacaagcugccugacgacuucaccggcugcgugcuggccuggaacaccagaaacaucgacgccacccagacaggcaacuacaauuacaaguacagaagccugcggcacggcaagcugcggcccuucgagagggacaucuccaacgugcccuucagccccgacggcaagccuuguacccccccugccuuuaacugcuacuggccccugaacgacuacggcuucuacaucacaaacggcaucggcuaucagcccuaccgggugguggugcuguccuuugagcugcugaaugccccugccaccgugugcggcccuaagcugagcaccgaccugaucaagaaccagugcgugaacuucaacuucaacggccugaccggcaccggcgugcugacaccuagcagcaagagauuccagcccuuccagcaguucggccgggacgugcuggauuucaccgacagcgugcgggaccccaagaccagcgagauccuggacaucagccccugcagcuucggcggaguguccgugaucacccccggcaccaauaccagcucugagguggccgugcuguaucaggacgugaacugcaccgaugugcccguggccauccacgccgaucagcugaccccaucuuggcggguguacuccaccggcaacaacguguuccagacacaagccggcugccugaucggagccgagcacguggacaccagcuacgagugcgacaucccuaucggcgcuggcaucugcgccagcuaccacaccguguccagccugagaagcaccagccagaaaucuaucguggccuacaccaugagccugggcgccgacagcucuaucgccuacuccaacaacacaaucgccauccccaccaauuucagcaucuccaucaccaccgaagugaugcccguguccauggccaagaccuccguggauugcaacauguacaucugcggcgacagcaccgagugcgccaaccugcugcugcaguacggcagcuucugcacccagcugaacagagcccugagcggaaucgccguggaacaggacagaaacacccgggaaguguucgcccaagugaagcagauguauaagacccccacccugaaggauuucggcggcuuuaacuucagccagauccugcccgacccucugaagccuaccaagcggagcuucaucgaggaccugcuguucaacaaagugacccuggccgacgccggcuuuaugaagcaguauggcgagugccugggcgacaucaacgcccgggaucugaucugcgcccagaaguuuaacggacugaccgugcugcccccucugcugaccgacgauaugaucgccgccuacacagccgcccuggugucuggcacagcuaccgccggauggacauuuggagcuggcgccgcucugcagauccccuuugccaugcagauggccuaccgguucaauggcaucggcgugacccagaaugugcuguacgagaaccagaagcagaucgccaaccaguucaacaaggccauuagccagauucaggaaagccugaccaccaccagcaccgcccugggcaaacugcaggacgucgugaaccagaacgcccaggcccugaacacccucgugaagcagcugagcagcaauuucggcgccaucagcuccgugcugaacgauauccugagcagacuggacaagguggaagcagaggugcagaucgaccggcugaucaccggcagacugcagagccugcagaccuacgugacacagcagcugauuagagccgccgagaucagggccagcgccaaucuggccgccacaaagaugagcgagugugugcugggccagagcaagcggguggacuucugcggcaagggcuaucaccugaugagcuucccccaggccgcuccucacggcgugguguuucugcacgugacauacgugcccagccaggaacggaacuucaccaccgccccagccaucugccacgagggcaaggccuacuucccccgggaaggcguguucguguuuaacggcaccuccugguuuaucacccagcggaauuucuucaguccgcagaucaucaccacagacaacaccuucguguccggcagcugcgacgucgugauuggcaucauuaacaacaccguguacgacccccugcagcccgagcuggacagcuucaaagaggaacuggacaaguacuucaagaaccacaccucccccgacguggaccugggcgauaucuccggcaucaaugccagcgucgugaauauccagaaagagaucgaucgccugaacgagguggccaagaaccugaaugagagccugaucgaccugcaggaacuggggaaguacgagcaguacaucaaguggccuugguacguguggcugggcuuuaucgccggccugaucgccaucgugauggucaccauccugcugugcugcaugaccagcuguugcagcugucugaagggcgccugcagcuguggcuccugcugcaaguucgaugaggacgacagcgagccugugcugaaaggcgugaagcugcacuacacc

SEQ ID NO: 49 - protein, 1255 aa, Artificial Sequence
  Synthetic
MFIFLFFLTLTSGSDLESCTTFDDVQAPNYPQHSSSRRGVYYPDEIFRSDTLYLTQDLFLPFYSNVTGFHTINHRFDNPVIPFKDGVYFAATEKSNVVRGWVFGSTMNNKSQSVIIINNSTNVVIRACNFELCDNPFFAVSKPTGTQTHTMIFDNAFNCTFEYISDSFSLDVAEKSGNFKHLREFVFKNKDGFLYVYKGYQPIDVVRDLPSGFNILKPIFKLPLGINITNFRAILTAFLPAQDTWGTSAAAYFVGYLKPATFMLKYDENGTITDAVDCSQNPLAELKCSVKSFEIDKGIYQTSNFRVAPSKEVVRFPNITNLCPFGEVFNATTFPSVYAWERKRISNCVADYSVLYNSTSFSTFKCYGVSATKLNDLCFSNVYADSFVVKGDDVRQIAPGQTGVIADYNYKLPDDFTGCVLAWNTRNIDATQTGNYNYKYRSLRHGKLRPFERDISNVPFSPDGKPCTPPAFNCYWPLNDYGFYITNGIGYQPYRVVVLSFELLNAPATVCGPKLSTDLIKNQCVNFNFNGLTGTGVLTPSSKRFQPFQQFGRDVLDFTDSVRDPKTSEILDISPCSFGGVSVITPGTNTSSEVAVLYQDVNCTDVPVAIHADQLTPSWRVYSTGNNVFQTQAGCLIGAEHVDTSYECDIPIGAGICASYHTVSSLRSTSQKSIVAYTMSLGADSSIAYSNNTIAIPTNFSISITTEVMPVSMAKTSVDCNMYICGDSTECANLLLQYGSFCTQLNRALSGIAVEQDRNTREVFAQVKQMYKTPTLKDFGGFNFSQILPDPLKPTKRSFIEDLLFNKVTLADAGFMKQYGECLGDINARDLICAQKFNGLTVLPPLLTDDMIAAYTAALVSGTATAGWTFGAGAALQIPFAMQMAYRFNGIGVTQNVLYENQKQIANQFNKAISQIQESLTTTSTALGKLQDVVNQNAQALNTLVKQLSSNFGAISSVLNDILSRLDPPEAEVQIDRLITGRLQSLQTYVTQQLIRAAEIRASANLAATKMSECVLGQSKRVDFCGKGYHLMSFPQAAPHGVVFLHVTYVPSQERNFTTAPAICHEGKAYFPREGVFVFNGTSWFITQRNFFSPQIITTDNTFVSGSCDVVIGIINNTVYDPLQPELDSFKEELDKYFKNHTSPDVDLGDISGINASVVNIQKEIDRLNEVAKNLNESLIDLQELGKYEQYIKWPWYVWLGFIAGLIAIVMVTILLCCMTSCCSCLKGACSCGSCCKFDEDDSEPVLKGVKLHYT

SEQ ID NO: 50 - RNA, 3765 nt, Artificial Sequence
  Synthetic
auguucaucuuccuguucuuccugacccugaccagcggcagcgaccuggagagcugcaccaccuucgacgacgugcaggccccuaacuacccucagcacagcagcagcagaagaggcguguacuacccugacgagaucuucagaagcgacacccuguaccugacccaggaccuguuccugccuuucuacagcaacgugaccggcuuccacaccaucaaccacagauucgacaacccugugaucccuuucaaggacggcguguacuucgccgccaccgagaagagcaacguggugagaggcuggguguucggcagcaccaugaacaacaagagccagagcgugaucaucaucaacaacagcaccaacguggugaucagagccugcaacuucgagcugugcgacaacccuuucuucgccgugagcaagccuaccggcacccagacccacaccaugaucuucgacaacgccuucaacugcaccuucgaguacaucagcgacagcuucagccuggacguggccgagaagagcggcaacuucaagcaccugagagaguucguguucaagaacaaggacggcuuccuguacguguacaagggcuaccagccuaucgacguggugagagaccugccuagcggcuucaacauccugaagccuaucuucaagcugccucugggcaucaacaucaccaacuucagagccauccugaccgccuuccugccugcccaggacaccuggggcaccagcgccgccgccuacuucgugggcuaccugaagccugccaccuucaugcugaaguacgacgagaacggcaccaucaccgacgccguggacugcagccagaacccucuggccgagcugaagugcagcgugaagagcuucgagaucgacaagggcaucuaccagaccagcaacuucagaguggccccuagcaaggagguggugagauucccuaacaucaccaaccugugcccuuucggcgagguguucaacgccaccaccuucccuagcguguacgccugggagagaaagagaaucagcaacugcguggccgacuacagcgugcuguacaacagcaccagcuucagcaccuucaagugcuacggcgugagcgccaccaagcugaacgaccugugcuucagcaacguguacgccgacagcuucguggugaagggcgacgacgugagacagaucgccccuggccagaccggcgugaucgccgacuacaacuacaagcugccugacgacuucaccggcugcgugcuggccuggaacaccagaaacaucgacgccacccagaccggcaacuacaacuacaaguacagaagccugagacacggcaagcugagaccuuucgagagagacaucagcaacgugccuuucagcccugacggcaagccuugcaccccuccugccuucaacugcuacuggccucugaacgacuacggcuucuacaucaccaacggcaucggcuaccagccuuacagagugguggugcugagcuucgagcugcugaacgccccugccaccgugugcggcccuaagcugagcaccgaccugaucaagaaccagugcgugaacuucaacuucaacggccugaccggcaccggcgugcugaccccuagcagcaagagauuccagccuuuccagcaguucggcagagacgugcuggacuucaccgacagcgugagagacccuaagaccagcgagauccuggacaucagcccuugcagcuucggcggcgugagcgugaucaccccuggcaccaacaccagcagcgagguggccgugcuguaccaggacgugaacugcaccgacgugccuguggccauccacgccgaccagcugaccccuagcuggagaguguacagcaccggcaacaacguguuccagacccaggccggcugccugaucggcgccgagcacguggacaccagcuacgagugcgacaucccuaucggcgccggcaucugcgccagcuaccacaccgugagcagccugagaagcaccagccagaagagcaucguggccuacaccaugagccugggcgccgacagcagcaucgccuacagcaacaacaccaucgccaucccuaccaacuucagcaucagcaucaccaccgaggugaugccugugagcauggccaagaccagcguggacugcaacauguacaucugcggcgacagcaccgagugcgccaaccugcugcugcaguacggcagcuucugcacccagcugaacagagcccugagcggcaucgccguggagcaggacagaaacaccagagagguguucgcccaggugaagcagauguacaagaccccuacccugaaggacuucggcggcuucaacuucagccagauccugccugacccucugaagccuaccaagagaagcuucaucgaggaccugcuguucaacaaggugacccuggccgacgccggcuucaugaagcaguacggcgagugccugggcgacaucaacgccagagaccugaucugcgcccagaaguucaacggccugaccgugcugccuccucugcugaccgacgacaugaucgccgccuacaccgccgcccuggugagcggcaccgccaccgccggcuggaccuucggcgccggcgccgcccugcagaucccuuucgccaugcagauggccuacagauucaacggcaucggcgugacccagaacgugcuguacgagaaccagaagcagaucgccaaccaguucaacaaggccaucagccagauccaggagagccugaccaccaccagcaccgcccugggcaagcugcaggacguggugaaccagaacgcccaggcccugaacacccuggugaagcagcugagcagcaacuucggcgccaucagcagcgugcugaacgacauccugagcagacuggacccuccugaggccgaggugcagaucgacagacugaucaccggcagacugcagagccugcagaccuacgugacccagcagcugaucagagccgccgagaucagagccagcgccaaccuggccgccaccaagaugagcgagugcgugcugggccagagcaagagaguggacuucugcggcaagggcuaccaccugaugagcuucccucaggccgccccucacggcgugguguuccugcacgugaccuacgugccuagccaggagagaaacuucaccaccgccccugccaucugccacgagggcaaggccuacuucccuagagagggcguguucguguucaacggcaccagcugguucaucacccagagaaacuucuucagcccucagaucaucaccaccgacaacaccuucgugagcggcagcugcgacguggugaucggcaucaucaacaacaccguguacgacccucugcagccugagcuggacagcuucaaggaggagcuggacaaguacuucaagaaccacaccagcccugacguggaccugggcgacaucagcggcaucaacgccagcguggugaacauccagaaggagaucgacagacugaacgagguggccaagaaccugaacgagagccugaucgaccugcaggagcugggcaaguacgagcaguacaucaaguggccuugguacguguggcugggcuucaucgccggccugaucgccaucgugauggugaccauccugcugugcugcaugaccagcugcugcagcugccugaagggcgccugcagcugcggcagcugcugcaaguucgacgaggacgacagcgagccugugcugaagggcgugaagcugcacuacacc

SEQ ID NO: 51 - RNA, 3956 nt, Artificial Sequence
  Synthetic
gggaaauaagagagaaaagaagaguaagaagaaauauaagaccccggcgccgccaccauguucguguuccuggugcugcugccccuggugagcagccagugcgugaaccugaccacccggacccagcugccaccagccuacaccaacagcuucacccggggcgucuacuaccccgacaagguguuccggagcagcguccugcacagcacccaggaccuguuccugcccuucuucagcaacgugaccugguuccacgccauccacgugagcggcaccaacggcaccaagcgguucgacaaccccgugcugcccuucaacgacggcguguacuucgccagcaccgagaagagcaacaucauccggggcuggaucuucggcaccacccuggacagcaagacccagagccugcugaucgugaauaacgccaccaacguggugaucaaggugugcgaguuccaguucugcaacgaccccuuccugggcguguacuaccacaagaacaacaagagcuggauggagagcgaguuccggguguacagcagcgccaacaacugcaccuucgaguacgugagccagcccuuccugauggaccuggagggcaagcagggcaacuucaagaaccugcgggaguucguguucaagaacaucgacggcuacuucaagaucuacagcaagcacaccccaaucaaccuggugcgggaucugccccagggcuucucagcccuggagccccugguggaccugcccaucggcaucaacaucacccgguuccagacccugcuggcccugcaccggagcuaccugaccccaggcgacagcagcagcggguggacagcaggcgcggcugcuuacuacgugggcuaccugcagccccggaccuuccugcugaaguacaacgagaacggcaccaucaccgacgccguggacugcgcccuggacccucugagcgagaccaagugcacccugaagagcuucaccguggagaagggcaucuaccagaccagcaacuuccgggugcagcccaccgagagcaucgugcgguuccccaacaucaccaaccugugccccuucggcgagguguucaacgccacccgguucgccagcguguacgccuggaaccggaagcggaucagcaacugcguggccgacuacagcgugcuguacaacagcgccagcuucagcaccuucaagugcuacggcgugagccccaccaagcugaacgaccugugcuucaccaacguguacgccgacagcuucgugauccguggcgacgaggugcggcagaucgcacccggccagacaggcaagaucgccgacuacaacuacaagcugcccgacgacuucaccggcugcgugaucgccuggaacagcaacaaccucgacagcaaggugggcggcaacuacaacuaccuguaccggcuguuccggaagagcaaccugaagcccuucgagcgggacaucagcaccgagaucuaccaagccggcuccaccccuugcaacggcguggagggcuucaacugcuacuucccucugcagagcuacggcuuccagcccaccaacggcgugggcuaccagcccuaccgggugguggugcugagcuucgagcugcugcacgccccagccaccguguguggccccaagaagagcaccaaccuggugaagaacaagugcgugaacuucaacuucaacggccuuaccggcaccggcgugcugaccgagagcaacaagaaauuccugcccuuucagcaguucggccgggacaucgccgacaccaccgacgcugugcgggauccccagacccuggagauccuggacaucaccccuugcagcuucggcggcgugagcgugaucaccccaggcaccaacaccagcaaccagguggccgugcuguaccaggacgugaacugcaccgaggugcccguggccauccacgccgaccagcugacacccaccuggcgggucuacagcaccggcagcaacguguuccagacccgggccgguugccugaucggcgccgagcacgugaacaacagcuacgagugcgacauccccaucggcgccggcaucugugccagcuaccagacccagaccaauucaccccggagggcaaggagcguggccagccagagcaucaucgccuacaccaugagccugggcgccgagaacagcguggccuacagcaacaacagcaucgccauccccaccaacuucaccaucagcgugaccaccgagauucugcccgugagcaugaccaagaccagcguggacugcaccauguacaucugcggcgacagcaccgagugcagcaaccugcugcugcaguacggcagcuucugcacccagcugaaccgggcccugaccggcaucgccguggagcaggacaagaacacccaggagguguucgcccaggugaagcagaucuacaagaccccucccaucaaggacuucggcggcuucaacuucagccagauccugcccgaccccagcaagcccagcaagcggagcuucaucgaggaccugcuguucaacaaggugacccuagccgacgccggcuucaucaagcaguacggcgacugccucggcgacauagccgcccgggaccugaucugcgcccagaaguucaacggccugaccgugcugccuccccugcugaccgacgagaugaucgcccaguacaccagcgcccuguuagccggaaccaucaccagcggcuggacuuucggcgcuggagccgcucugcagauccccuucgccaugcagauggccuaccgguucaacggcaucggcgugacccagaacgugcuguacgagaaccagaagcugaucgccaaccaguucaacagcgccaucggcaagauccaggacagccugagcagcaccgcuagcgcccugggcaagcugcaggacguggugaaccagaacgcccaggcccugaacacccuggugaagcagcugagcagcaacuucggcgccaucagcagcgugcugaacgacauccugagccggcuggacaagguggaggccgaggugcagaucgaccggcugaucacuggccggcugcagagccugcagaccuacgugacccagcagcugauccgggccgccgagauucgggccagcgccaaccuggccgccaccaagaugagcgagugcgugcugggccagagcaagcggguggacuucugcggcaagggcuaccaccugaugagcuuuccccagagcgcaccccacggagugguguuccugcacgugaccuacgugcccgcccaggagaagaacuucaccaccgccccagccaucugccacgacggcaaggcccacuuuccccgggagggcguguucgugagcaacggcacccacugguucgugacccagcggaacuucuacgagccccagaucaucaccaccgacaacaccuucgugagcggcaacugcgacguggugaucggcaucgugaacaacaccguguacgauccccugcagcccgagcuggacagcuucaaggaggagcuggacaaguacuucaagaaucacaccagccccgacguggaccugggcgacaucagcggcaucaacgccagcguggugaacauccagaaggagaucgaucggcugaacgagguggccaagaaccugaacgagagccugaucgaccugcaggagcugggcaaguacgagcaguacaucaaguggcccugguacaucuggcugggcuucaucgccggccugaucgccaucgugauggugaccaucaugcugugcugcaugaccagcugcugcagcugccugaagggcuguugcagcugcggcagcugcugcaaguucgacgaggacgacugauaauaggcuggagccucgguggccuagcuucuugccccuugggccuccccccagccccuccuccccuuccugcacccguacccccguggucuuugaauaaagucugagugggcggc

SEQ ID NO: 52 - RNA, 3780 nt, Artificial Sequence
  Synthetic
auguucguguuccuggugcugcugccccuggugagcagccagugcgugaaccugaccacccggacccagcugccaccagccuacaccaacagcuucacccggggcgucuacuaccccgacaagguguuccggagcagcguccugcacagcacccaggaccuguuccugcccuucuucagcaacgugaccugguuccacgccauccacgugagcggcaccaacggcaccaagcgguucgacaaccccgugcugcccuucaacgacggcguguacuucgccagcaccgagaagagcaacaucauccggggcuggaucuucggcaccacccuggacagcaagacccagagccugcugaucgugaauaacgccaccaacguggugaucaaggugugcgaguuccaguucugcaacgaccccuuccugggcguguacuaccacaagaacaacaagagcuggauggagagcgaguuccggguguacagcagcgccaacaacugcaccuucgaguacgugagccagcccuuccugauggaccuggagggcaagcagggcaacuucaagaaccugcgggaguucguguucaagaacaucgacggcuacuucaagaucuacagcaagcacaccccaaucaaccuggugcgggaucugccccagggcuucucagcccuggagccccugguggaccugcccaucggcaucaacaucacccgguuccagacccugcuggcccugcaccggagcuaccugaccccaggcgacagcagcagcggguggacagcaggcgcggcugcuuacuacgugggcuaccugcagccccggaccuuccugcugaaguacaacgagaacggcaccaucaccgacgccguggacugcgcccuggacccucugagcgagaccaagugcacccugaagagcuucaccguggagaagggcaucuaccagaccagcaacuuccgggugcagcccaccgagagcaucgugcgguuccccaacaucaccaaccugugccccuucggcgagguguucaacgccacccgguucgccagcguguacgccuggaaccggaagcggaucagcaacugcguggccgacuacagcgugcuguacaacagcgccagcuucagcaccuucaagugcuacggcgugagccccaccaagcugaacgaccugugcuucaccaacguguacgccgacagcuucgugauccguggcgacgaggugcggcagaucgcacccggccagacaggcaagaucgccgacuacaacuacaagcugcccgacgacuucaccggcugcgugaucgccuggaacagcaacaaccucgacagcaaggugggcggcaacuacaacuaccuguaccggcuguuccggaagagcaaccugaagcccuucgagcgggacaucagcaccgagaucuaccaagccggcuccaccccuugcaacggcguggagggcuucaacugcuacuucccucugcagagcuacggcuuccagcccaccaacggcgugggcuaccagcccuaccgggugguggugcugagcuucgagcugcugcacgccccagccaccguguguggccccaagaagagcaccaaccuggugaagaacaagugcgugaacuucaacuucaacggccuuaccggcaccggcgugcugaccgagagcaacaagaaauuccugcccuuucagcaguucggccgggacaucgccgacaccaccgacgcugugcgggauccccagacccuggagauccuggacaucaccccuugcagcuucggcggcgugagcgugaucaccccaggcaccaacaccagcaaccagguggccgugcuguaccaggacgugaacugcaccgaggugcccguggccauccacgccgaccagcugacacccaccuggcgggucuacagcaccggcagcaacguguuccagacccgggccgguugccugaucggcgccgagcacgugaacaacagcuacgagugcgacauccccaucggcgccggcaucugugccagcuaccagacccagaccaauucaccccggagggcaaggagcguggccagccagagcaucaucgccuacaccaugagccugggcgccgagaacagcguggccuacagcaacaacagcaucgccauccccaccaacuucaccaucagcgugaccaccgagauucugcccgugagcaugaccaagaccagcguggacugcaccauguacaucugcggcgacagcaccgagugcagcaaccugcugcugcaguacggcagcuucugcacccagcugaaccgggcccugaccggcaucgccguggagcaggacaagaacacccaggagguguucgcccaggugaagcagaucuacaagaccccucccaucaaggacuucggcggcuucaacuucagccagauccugcccgaccccagcaagcccagcaagcggagcuucaucgaggaccugcuguucaacaaggugacccuagccgacgccggcuucaucaagcaguacggcgacugccucggcgacauagccgcccgggaccugaucugcgcccagaaguucaacggccugaccgugcugccuccccugcugaccgacgagaugaucgcccaguacaccagcgcccuguuagccggaaccaucaccagcggcuggacuuucggcgcuggagccgcucugcagauccccuucgccaugcagauggccuaccgguucaacggcaucggcgugacccagaacgugcuguacgagaaccagaagcugaucgccaaccaguucaacagcgccaucggcaagauccaggacagccugagcagcaccgcuagcgcccugggcaagcugcaggacguggugaaccagaacgcccaggcccugaacacccuggugaagcagcugagcagcaacuucggcgccaucagcagcgugcugaacgacauccugagccggcuggacaagguggaggccgaggugcagaucgaccggcugaucacuggccggcugcagagccugcagaccuacgugacccagcagcugauccgggccgccgagauucgggccagcgccaaccuggccgccaccaagaugagcgagugcgugcugggccagagcaagcggguggacuucugcggcaagggcuaccaccugaugagcuuuccccagagcgcaccccacggagugguguuccugcacgugaccuacgugcccgcccaggagaagaacuucaccaccgccccagccaucugccacgacggcaaggcccacuuuccccgggagggcguguucgugagcaacggcacccacugguucgugacccagcggaacuucuacgagccccagaucaucaccaccgacaacaccuucgugagcggcaacugcgacguggugaucggcaucgugaacaacaccguguacgauccccugcagcccgagcuggacagcuucaaggaggagcuggacaaguacuucaagaaucacaccagccccgacguggaccugggcgacaucagcggcaucaacgccagcguggugaacauccagaaggagaucgaucggcugaacgagguggccaagaaccugaacgagagccugaucgaccugcaggagcugggcaaguacgagcaguacaucaaguggcccugguacaucuggcugggcuucaucgccggccugaucgccaucgugauggugaccaucaugcugugcugcaugaccagcugcugcagcugccugaagggcuguugcagcugcggcagcugcugcaaguucgacgaggacgac

SEQ ID NO: 53 - RNA, 3956 nt, Artificial Sequence
  Synthetic
gggaaauaagagagaaaagaagaguaagaagaaauauaagaccccggcgccgccaccauguucguguuccuggugcugcugccccuggugagcagccagugcgugaaccugaccacccggacccagcugccaccagccuacaccaacagcuucacccggggcgucuacuaccccgacaagguguuccggagcagcguccugcacagcacccaggaccuguuccugcccuucuucagcaacgugaccugguuccacgccauccacgugagcggcaccaacggcaccaagcgguucgacaaccccgugcugcccuucaacgacggcguguacuucgccagcaccgagaagagcaacaucauccggggcuggaucuucggcaccacccuggacagcaagacccagagccugcugaucgugaauaacgccaccaacguggugaucaaggugugcgaguuccaguucugcaacgaccccuuccugggcguguacuaccacaagaacaacaagagcuggauggagagcgaguuccggguguacagcagcgccaacaacugcaccuucgaguacgugagccagcccuuccugauggaccuggagggcaagcagggcaacuucaagaaccugcgggaguucguguucaagaacaucgacggcuacuucaagaucuacagcaagcacaccccaaucaaccuggugcgggaucugccccagggcuucucagcccuggagccccugguggaccugcccaucggcaucaacaucacccgguuccagacccugcuggcccugcaccggagcuaccugaccccaggcgacagcagcagcggguggacagcaggcgcggcugcuuacuacgugggcuaccugcagccccggaccuuccugcugaaguacaacgagaacggcaccaucaccgacgccguggacugcgcccuggacccucugagcgagaccaagugcacccugaagagcuucaccguggagaagggcaucuaccagaccagcaacuuccgggugcagcccaccgagagcaucgugcgguuccccaacaucaccaaccugugccccuucggcgagguguucaacgccacccgguucgccagcguguacgccuggaaccggaagcggaucagcaacugcguggccgacuacagcgugcuguacaacagcgccagcuucagcaccuucaagugcuacggcgugagccccaccaagcugaacgaccugugcuucaccaacguguacgccgacagcuucgugauccguggcgacgaggugcggcagaucgcacccggccagacaggcaagaucgccgacuacaacuacaagcugcccgacgacuucaccggcugcgugaucgccuggaacagcaacaaccucgacagcaaggugggcggcaacuacaacuaccuguaccggcuguuccggaagagcaaccugaagcccuucgagcgggacaucagcaccgagaucuaccaagccggcuccaccccuugcaacggcguggagggcuucaacugcuacuucccucugcagagcuacggcuuccagcccaccaacggcgugggcuaccagcccuaccgggugguggugcugagcuucgagcugcugcacgccccagccaccguguguggccccaagaagagcaccaaccuggugaagaacaagugcgugaacuucaacuucaacggccuuaccggcaccggcgugcugaccgagagcaacaagaaauuccugcccuuucagcaguucggccgggacaucgccgacaccaccgacgcugugcgggauccccagacccuggagauccuggacaucaccccuugcagcuucggcggcgugagcgugaucaccccaggcaccaacaccagcaaccagguggccgugcuguaccaggacgugaacugcaccgaggugcccguggccauccacgccgaccagcugacacccaccuggcgggucuacagcaccggcagcaacguguuccagacccgggccgguugccugaucggcgccgagcacgugaacaacagcuacgagugcgacauccccaucggcgccggcaucugugccagcuaccagacccagaccaauucaccccggagggcaaggagcguggccagccagagcaucaucgccuacaccaugagccugggcgccgagaacagcguggccuacagcaacaacagcaucgccauccccaccaacuucaccaucagcgugaccaccgagauucugcccgugagcaugaccaagaccagcguggacugcaccauguacaucugcggcgacagcaccgagugcagcaaccugcugcugcaguacggcagcuucugcacccagcugaaccgggcccugaccggcaucgccguggagcaggacaagaacacccaggagguguucgcccaggugaagcagaucuacaagaccccucccaucaaggacuucggcggcuucaacuucagccagauccugcccgaccccagcaagcccagcaagcggagcuucaucgaggaccugcuguucaacaaggugacccuagccgacgccggcuucaucaagcaguacggcgacugccucggcgacauagccgcccgggaccugaucugcgcccagaaguucaacggccugaccgugcugccuccccugcugaccgacgagaugaucgcccaguacaccagcgcccuguuagccggaaccaucaccagcggcuggacuuucggcgcuggagccgcucugcagauccccuucgccaugcagauggccuaccgguucaacggcaucggcgugacccagaacgugcuguacgagaaccagaagcugaucgccaaccaguucaacagcgccaucggcaagauccaggacagccugagcagcaccgcuagcgcccugggcaagcugcaggacguggugaaccagaacgcccaggcccugaacacccuggugaagcagcugagcagcaacuucggcgccaucagcagcgugcugaacgacauccugagccggcuggacccucccgaggccgaggugcagaucgaccggcugaucacuggccggcugcagagccugcagaccuacgugacccagcagcugauccgggccgccgagauucgggccagcgccaaccuggccgccaccaagaugagcgagugcgugcugggccagagcaagcggguggacuucugcggcaagggcuaccaccugaugagcuuuccccagagcgcaccccacggagugguguuccugcacgugaccuacgugcccgcccaggagaagaacuucaccaccgccccagccaucugccacgacggcaaggcccacuuuccccgggagggcguguucgugagcaacggcacccacugguucgugacccagcggaacuucuacgagccccagaucaucaccaccgacaacaccuucgugagcggcaacugcgacguggugaucggcaucgugaacaacaccguguacgauccccugcagcccgagcuggacagcuucaaggaggagcuggacaaguacuucaagaaucacaccagccccgacguggaccugggcgacaucagcggcaucaacgccagcguggugaacauccagaaggagaucgaucggcugaacgagguggccaagaaccugaacgagagccugaucgaccugcaggagcugggcaaguacgagcaguacaucaaguggcccugguacaucuggcugggcuucaucgccggccugaucgccaucgugauggugaccaucaugcugugcugcaugaccagcugcugcagcugccugaagggcuguugcagcugcggcagcugcugcaaguucgacgaggacgacugauaauaggcuggagccucgguggccuagcuucuugccccuugggccuccccccagccccuccuccccuuccugcacccguacccccguggucuuugaauaaagucugagugggcggc

SEQ ID NO: 54 - RNA, 3780 nt, Artificial Sequence
  Synthetic
auguucguguuccuggugcugcugccccuggugagcagccagugcgugaaccugaccacccggacccagcugccaccagccuacaccaacagcuucacccggggcgucuacuaccccgacaagguguuccggagcagcguccugcacagcacccaggaccuguuccugcccuucuucagcaacgugaccugguuccacgccauccacgugagcggcaccaacggcaccaagcgguucgacaaccccgugcugcccuucaacgacggcguguacuucgccagcaccgagaagagcaacaucauccggggcuggaucuucggcaccacccuggacagcaagacccagagccugcugaucgugaauaacgccaccaacguggugaucaaggugugcgaguuccaguucugcaacgaccccuuccugggcguguacuaccacaagaacaacaagagcuggauggagagcgaguuccggguguacagcagcgccaacaacugcaccuucgaguacgugagccagcccuuccugauggaccuggagggcaagcagggcaacuucaagaaccugcgggaguucguguucaagaacaucgacggcuacuucaagaucuacagcaagcacaccccaaucaaccuggugcgggaucugccccagggcuucucagcccuggagccccugguggaccugcccaucggcaucaacaucacccgguuccagacccugcuggcccugcaccggagcuaccugaccccaggcgacagcagcagcggguggacagcaggcgcggcugcuuacuacgugggcuaccugcagccccggaccuuccugcugaaguacaacgagaacggcaccaucaccgacgccguggacugcgcccuggacccucugagcgagaccaagugcacccugaagagcuucaccguggagaagggcaucuaccagaccagcaacuuccgggugcagcccaccgagagcaucgugcgguuccccaacaucaccaaccugugccccuucggcgagguguucaacgccacccgguucgccagcguguacgccuggaaccggaagcggaucagcaacugcguggccgacuacagcgugcuguacaacagcgccagcuucagcaccuucaagugcuacggcgugagccccaccaagcugaacgaccugugcuucaccaacguguacgccgacagcuucgugauccguggcgacgaggugcggcagaucgcacccggccagacaggcaagaucgccgacuacaacuacaagcugcccgacgacuucaccggcugcgugaucgccuggaacagcaacaaccucgacagcaaggugggcggcaacuacaacuaccuguaccggcuguuccggaagagcaaccugaagcccuucgagcgggacaucagcaccgagaucuaccaagccggcuccaccccuugcaacggcguggagggcuucaacugcuacuucccucugcagagcuacggcuuccagcccaccaacggcgugggcuaccagcccuaccgggugguggugcugagcuucgagcugcugcacgccccagccaccguguguggccccaagaagagcaccaaccuggugaagaacaagugcgugaacuucaacuucaacggccuuaccggcaccggcgugcugaccgagagcaacaagaaauuccugcccuuucagcaguucggccgggacaucgccgacaccaccgacgcugugcgggauccccagacccuggagauccuggacaucaccccuugcagcuucggcggcgugagcgugaucaccccaggcaccaacaccagcaaccagguggccgugcuguaccaggacgugaacugcaccgaggugcccguggccauccacgccgaccagcugacacccaccuggcgggucuacagcaccggcagcaacguguuccagacccgggccgguugccugaucggcgccgagcacgugaacaacagcuacgagugcgacauccccaucggcgccggcaucugugccagcuaccagacccagaccaauucaccccggagggcaaggagcguggccagccagagcaucaucgccuacaccaugagccugggcgccgagaacagcguggccuacagcaacaacagcaucgccauccccaccaacuucaccaucagcgugaccaccgagauucugcccgugagcaugaccaagaccagcguggacugcaccauguacaucugcggcgacagcaccgagugcagcaaccugcugcugcaguacggcagcuucugcacccagcugaaccgggcccugaccggcaucgccguggagcaggacaagaacacccaggagguguucgcccaggugaagcagaucuacaagaccccucccaucaaggacuucggcggcuucaacuucagccagauccugcccgaccccagcaagcccagcaagcggagcuucaucgaggaccugcuguucaacaaggugacccuagccgacgccggcuucaucaagcaguacggcgacugccucggcgacauagccgcccgggaccugaucugcgcccagaaguucaacggccugaccgugcugccuccccugcugaccgacgagaugaucgcccaguacaccagcgcccuguuagccggaaccaucaccagcggcuggacuuucggcgcuggagccgcucugcagauccccuucgccaugcagauggccuaccgguucaacggcaucggcgugacccagaacgugcuguacgagaaccagaagcugaucgccaaccaguucaacagcgccaucggcaagauccaggacagccugagcagcaccgcuagcgcccugggcaagcugcaggacguggugaaccagaacgcccaggcccugaacacccuggugaagcagcugagcagcaacuucggcgccaucagcagcgugcugaacgacauccugagccggcuggacccucccgaggccgaggugcagaucgaccggcugaucacuggccggcugcagagccugcagaccuacgugacccagcagcugauccgggccgccgagauucgggccagcgccaaccuggccgccaccaagaugagcgagugcgugcugggccagagcaagcggguggacuucugcggcaagggcuaccaccugaugagcuuuccccagagcgcaccccacggagugguguuccugcacgugaccuacgugcccgcccaggagaagaacuucaccaccgccccagccaucugccacgacggcaaggcccacuuuccccgggagggcguguucgugagcaacggcacccacugguucgugacccagcggaacuucuacgagccccagaucaucaccaccgacaacaccuucgugagcggcaacugcgacguggugaucggcaucgugaacaacaccguguacgauccccugcagcccgagcuggacagcuucaaggaggagcuggacaaguacuucaagaaucacaccagccccgacguggaccugggcgacaucagcggcaucaacgccagcguggugaacauccagaaggagaucgaucggcugaacgagguggccaagaaccugaacgagagccugaucgaccugcaggagcugggcaaguacgagcaguacaucaaguggcccugguacaucuggcugggcuucaucgccggccugaucgccaucgugauggugaccaucaugcugugcugcaugaccagcugcugcagcugccugaagggcuguugcagcugcggcagcugcugcaaguucgacgaggacgac

SEQ ID NO: 55 - RNA, 3702 nt, Artificial Sequence
  Synthetic
gggaaauaagagagaaaagaagaguaagaagaaauauaagaccccggcgccgccaccuuucaacgacggcguguacuucgccagcaccgagaagagcaacaucauccggggcuggaucuucggcaccacccuggacagcaagacccagagccugcugaucgugaauaacgccaccaacguggugaucaaggugugcgaguuccaguucugcaacgaccccuuccugggcguguacuaccacaagaacaacaagagcuggauggagagcgaguuccggguguacagcagcgccaacaacugcaccuucgaguacgugagccagcccuuccugauggaccuggagggcaagcagggcaacuucaagaaccugcgggaguucguguucaagaacaucgacggcuacuucaagaucuacagcaagcacaccccaaucaaccuggugcgggaucugccccagggcuucucagcccuggagccccugguggaccugcccaucggcaucaacaucacccgguuccagacccugcuggcccugcaccggagcuaccugaccccaggcgacagcagcagcggguggacagcaggcgcggcugcuuacuacgugggcuaccugcagccccggaccuuccugcugaaguacaacgagaacggcaccaucaccgacgccguggacugcgcccuggacccucugagcgagaccaagugcacccugaagagcuucaccguggagaagggcaucuaccagaccagcaacuuccgggugcagcccaccgagagcaucgugcgguuccccaacaucaccaaccugugccccuucggcgagguguucaacgccacccgguucgccagcguguacgccuggaaccggaagcggaucagcaacugcguggccgacuacagcgugcuguacaacagcgccagcuucagcaccuucaagugcuacggcgugagccccaccaagcugaacgaccugugcuucaccaacguguacgccgacagcuucgugauccguggcgacgaggugcggcagaucgcacccggccagacaggcaagaucgccgacuacaacuacaagcugcccgacgacuucaccggcugcgugaucgccuggaacagcaacaaccucgacagcaaggugggcggcaacuacaacuaccuguaccggcuguuccggaagagcaaccugaagcccuucgagcgggacaucagcaccgagaucuaccaagccggcuccaccccuugcaacggcguggagggcuucaacugcuacuucccucugcagagcuacggcuuccagcccaccaacggcgugggcuaccagcccuaccgggugguggugcugagcuucgagcugcugcacgccccagccaccguguguggccccaagaagagcaccaaccuggugaagaacaagugcgugaacuucaacuucaacggccuuaccggcaccggcgugcugaccgagagcaacaagaaauuccugcccuuucagcaguucggccgggacaucgccgacaccaccgacgcugugcgggauccccagacccuggagauccuggacaucaccccuugcagcuucggcggcgugagcgugaucaccccaggcaccaacaccagcaaccagguggccgugcuguaccaggacgugaacugcaccgaggugcccguggccauccacgccgaccagcugacacccaccuggcgggucuacagcaccggcagcaacguguuccagacccgggccgguugccugaucggcgccgagcacgugaacaacagcuacgagugcgacauccccaucggcgccggcaucugugccagcuaccagacccagaccaauucacccggcagcggcggcagcguggccagccagagcaucaucgccuacaccaugagccugggcgccgagaacagcguggccuacagcaacaacagcaucgccauccccaccaacuucaccaucagcgugaccaccgagauucugcccgugagcaugaccaagaccagcguggacugcaccauguacaucugcggcgacagcaccgagugcagcaaccugcugcugcaguacggcagcuucugcacccagcugaaccgggcccugaccggcaucgccguggagcaggacaagaacacccaggagguguucgcccaggugaagcagaucuacaagaccccucccaucaaggacuucggcggcuucaacuucagccagauccugcccgaccccagcaagcccagcaagcggagcuucaucgaggaccugcuguucaacaaggugacccuagccgacgccggcuucaucaagcaguacggcgacugccucggcgacauagccgcccgggaccugaucugcgcccagaaguucaacggccugaccgugcugccuccccugcugaccgacgagaugaucgcccaguacaccagcgcccuguuagccggaaccaucaccagcggcuggacuuucggcgcuggagccgcucugcagauccccuucgccaugcagauggccuaccgguucaacggcaucggcgugacccagaacgugcuguacgagaaccagaagcugaucgccaaccaguucaacagcgccaucggcaagauccaggacagccugagcagcaccgcuagcgcccugggcaagcugcaggacguggugaaccagaacgcccaggcccugaacacccuggugaagcagcugagcagcaacuucggcgccaucagcagcgugcugaacgacauccugagccggcuggacccucccgaggccgaggugcagaucgaccggcugaucacuggccggcugcagagccugcagaccuacgugacccagcagcugauccgggccgccgagauucgggccagcgccaaccuggccgccaccaagaugagcgagugcgugcugggccagagcaagcggguggacuucugcggcaagggcuaccaccugaugagcuuuccccagagcgcaccccacggagugguguuccugcacgugaccuacgugcccgcccaggagaagaacuucaccaccgccccagccaucugccacgacggcaaggcccacuuuccccgggagggcguguucgugagcaacggcacccacugguucgugacccagcggaacuucuacgagccccagaucaucaccaccgacaacaccuucgugagcggcaacugcgacguggugaucggcaucgugaacaacaccguguacgauccccugcagcccgagcuggacagcuucaaggaggagcuggacaaguacuucaagaaucacaccagccccgacguggaccugggcgacaucagcggcaucaacgccagcguggugaacauccagaaggagaucgaucggcugaacgagguggccaagaaccugaacgagagccugaucgaccugcaggagcugggcaaguacgagcaguacaucaaguggcccugguacaucuggcugggcuucaucgccggccugaucgccaucgugauggugaccaucaugcugugcugcaugaccagcugcugcagcugccugaagggcuguugcagcugcggcagcugcugcaaguucgacgaggacgacugauaauaggcuggagccucgguggccuagcuucuugccccuugggccuccccccagccccuccuccccuuccugcacccguacccccguggucuuugaauaaagucugagugggcggc

SEQ ID NO: 56 - RNA, 3526 nt, Artificial Sequence
  Synthetic
uuucaacgacggcguguacuucgccagcaccgagaagagcaacaucauccggggcuggaucuucggcaccacccuggacagcaagacccagagccugcugaucgugaauaacgccaccaacguggugaucaaggugugcgaguuccaguucugcaacgaccccuuccugggcguguacuaccacaagaacaacaagagcuggauggagagcgaguuccggguguacagcagcgccaacaacugcaccuucgaguacgugagccagcccuuccugauggaccuggagggcaagcagggcaacuucaagaaccugcgggaguucguguucaagaacaucgacggcuacuucaagaucuacagcaagcacaccccaaucaaccuggugcgggaucugccccagggcuucucagcccuggagccccugguggaccugcccaucggcaucaacaucacccgguuccagacccugcuggcccugcaccggagcuaccugaccccaggcgacagcagcagcggguggacagcaggcgcggcugcuuacuacgugggcuaccugcagccccggaccuuccugcugaaguacaacgagaacggcaccaucaccgacgccguggacugcgcccuggacccucugagcgagaccaagugcacccugaagagcuucaccguggagaagggcaucuaccagaccagcaacuuccgggugcagcccaccgagagcaucgugcgguuccccaacaucaccaaccugugccccuucggcgagguguucaacgccacccgguucgccagcguguacgccuggaaccggaagcggaucagcaacugcguggccgacuacagcgugcuguacaacagcgccagcuucagcaccuucaagugcuacggcgugagccccaccaagcugaacgaccugugcuucaccaacguguacgccgacagcuucgugauccguggcgacgaggugcggcagaucgcacccggccagacaggcaagaucgccgacuacaacuacaagcugcccgacgacuucaccggcugcgugaucgccuggaacagcaacaaccucgacagcaaggugggcggcaacuacaacuaccuguaccggcuguuccggaagagcaaccugaagcccuucgagcgggacaucagcaccgagaucuaccaagccggcuccaccccuugcaacggcguggagggcuucaacugcuacuucccucugcagagcuacggcuuccagcccaccaacggcgugggcuaccagcccuaccgggugguggugcugagcuucgagcugcugcacgccccagccaccguguguggccccaagaagagcaccaaccuggugaagaacaagugcgugaacuucaacuucaacggccuuaccggcaccggcgugcugaccgagagcaacaagaaauuccugcccuuucagcaguucggccgggacaucgccgacaccaccgacgcugugcgggauccccagacccuggagauccuggacaucaccccuugcagcuucggcggcgugagcgugaucaccccaggcaccaacaccagcaaccagguggccgugcuguaccaggacgugaacugcaccgaggugcccguggccauccacgccgaccagcugacacccaccuggcgggucuacagcaccggcagcaacguguuccagacccgggccgguugccugaucggcgccgagcacgugaacaacagcuacgagugcgacauccccaucggcgccggcaucugugccagcuaccagacccagaccaauucacccggcagcggcggcagcguggccagccagagcaucaucgccuacaccaugagccugggcgccgagaacagcguggccuacagcaacaacagcaucgccauccccaccaacuucaccaucagcgugaccaccgagauucugcccgugagcaugaccaagaccagcguggacugcaccauguacaucugcggcgacagcaccgagugcagcaaccugcugcugcaguacggcagcuucugcacccagcugaaccgggcccugaccggcaucgccguggagcaggacaagaacacccaggagguguucgcccaggugaagcagaucuacaagaccccucccaucaaggacuucggcggcuucaacuucagccagauccugcccgaccccagcaagcccagcaagcggagcuucaucgaggaccugcuguucaacaaggugacccuagccgacgccggcuucaucaagcaguacggcgacugccucggcgacauagccgcccgggaccugaucugcgcccagaaguucaacggccugaccgugcugccuccccugcugaccgacgagaugaucgcccaguacaccagcgcccuguuagccggaaccaucaccagcggcuggacuuucggcgcuggagccgcucugcagauccccuucgccaugcagauggccuaccgguucaacggcaucggcgugacccagaacgugcuguacgagaaccagaagcugaucgccaaccaguucaacagcgccaucggcaagauccaggacagccugagcagcaccgcuagcgcccugggcaagcugcaggacguggugaaccagaacgcccaggcccugaacacccuggugaagcagcugagcagcaacuucggcgccaucagcagcgugcugaacgacauccugagccggcuggacccucccgaggccgaggugcagaucgaccggcugaucacuggccggcugcagagccugcagaccuacgugacccagcagcugauccgggccgccgagauucgggccagcgccaaccuggccgccaccaagaugagcgagugcgugcugggccagagcaagcggguggacuucugcggcaagggcuaccaccugaugagcuuuccccagagcgcaccccacggagugguguuccugcacgugaccuacgugcccgcccaggagaagaacuucaccaccgccccagccaucugccacgacggcaaggcccacuuuccccgggagggcguguucgugagcaacggcacccacugguucgugacccagcggaacuucuacgagccccagaucaucaccaccgacaacaccuucgugagcggcaacugcgacguggugaucggcaucgugaacaacaccguguacgauccccugcagcccgagcuggacagcuucaaggaggagcuggacaaguacuucaagaaucacaccagccccgacguggaccugggcgacaucagcggcaucaacgccagcguggugaacauccagaaggagaucgaucggcugaacgagguggccaagaaccugaacgagagccugaucgaccugcaggagcugggcaaguacgagcaguacaucaaguggcccugguacaucuggcugggcuucaucgccggccugaucgccaucgugauggugaccaucaugcugugcugcaugaccagcugcugcagcugccugaagggcuguugcagcugcggcagcugcugcaaguucgacgaggacgac

SEQ ID NO: 57 - RNA, 3941 nt, Artificial Sequence
  Synthetic
gggaaauaagagagaaaagaagaguaagaagaaauauaagaccccggcgccgccaccauguuuaucuuccuguucuuccugacccugaccagcggcagcgaccuggaaagcugcaccaccuucgacgacgugcaggcccccaacuacccucagcacagcucuagcagacggggcguguacuaccccgacgagaucuucagaagcgacacccuguaccugacccaggaccuguuccugcccuucuacagcaacgugaccggcuuccacaccaucaaccacagauucgacaaccccgugauccccuucaaggacgggguguacuuugccgccaccgagaaguccaaugucgugcggggauggguguucggcagcaccaugaacaacaagagccagagcgugaucaucaucaacaacagcaccaacgucgugauccgggccugcaacuucgagcugugcgacaacccauucuucgccguguccaagcccaccggcacccagacccacaccaugaucuucgacaacgccuucaacugcaccuucgaguacaucagcgacagcuucagccuggacguggccgagaaaagcggcaacuucaagcaccugagagaauucguguucaagaacaaggacggcuuccuguacguguacaagggcuaccagcccaucgacgucgugcgcgaucugcccagcggcuucaacauccugaagcccaucuucaagcugccccugggcaucaacaucaccaacuuccgggcuauccugaccgccuuccugcccgcccaggauaccuggggaacaagcgccgcugccuacuucgugggcuaccugaagccugccaccuucaugcugaaguacgacgagaacggcaccaucaccgacgccguggacugcagccagaauccucuggccgagcugaagugcagcgugaaguccuucgagaucgacaagggcaucuaccagaccagcaacuucagaguggcccccagcaaagaagucgugcgguuccccaauaucaccaaccugugccccuucggcgagguguucaacgccaccaccuuucccagcguguacgccugggagcggaagcggaucagcaacugcguggccgacuacagcgugcuguacaacuccaccagcuucuccaccuucaagugcuacggcguguccgccaccaagcugaacgaccugugcuucagcaauguguacgccgacuccuucgucgugaagggcgacgaugugcgccagaucgccccuggacagacaggcgugaucgccgauuacaacuacaagcugccugacgacuucaccggcugcgugcuggccuggaacaccagaaacaucgacgccacccagacaggcaacuacaauuacaaguacagaagccugcggcacggcaagcugcggcccuucgagagggacaucuccaacgugcccuucagccccgacggcaagccuuguacccccccugccuuuaacugcuacuggccccugaacgacuacggcuucuacaucacaaacggcaucggcuaucagcccuaccgggugguggugcuguccuuugagcugcugaaugccccugccaccgugugcggcccuaagcugagcaccgaccugaucaagaaccagugcgugaacuucaacuucaacggccugaccggcaccggcgugcugacaccuagcagcaagagauuccagcccuuccagcaguucggccgggacgugcuggauuucaccgacagcgugcgggaccccaagaccagcgagauccuggacaucagccccugcagcuucggcggaguguccgugaucacccccggcaccaauaccagcucugagguggccgugcuguaucaggacgugaacugcaccgaugugcccguggccauccacgccgaucagcugaccccaucuuggcggguguacuccaccggcaacaacguguuccagacacaagccggcugccugaucggagccgagcacguggacaccagcuacgagugcgacaucccuaucggcgcuggcaucugcgccagcuaccacaccguguccagccugagaagcaccagccagaaaucuaucguggccuacaccaugagccugggcgccgacagcucuaucgccuacuccaacaacacaaucgccauccccaccaauuucagcaucuccaucaccaccgaagugaugcccguguccauggccaagaccuccguggauugcaacauguacaucugcggcgacagcaccgagugcgccaaccugcugcugcaguacggcagcuucugcacccagcugaacagagcccugagcggaaucgccguggaacaggacagaaacacccgggaaguguucgcccaagugaagcagauguauaagacccccacccugaaggauuucggcggcuuuaacuucagccagauccugcccgacccucugaagccuaccaagcggagcuucaucgaggaccugcuguucaacaaagugacccuggccgacgccggcuuuaugaagcaguauggcgagugccugggcgacaucaacgcccgggaucugaucugcgcccagaaguuuaacggacugaccgugcugcccccucugcugaccgacgauaugaucgccgccuacacagccgcccuggugucuggcacagcuaccgccggauggacauuuggagcuggcgccgcucugcagauccccuuugccaugcagauggccuaccgguucaauggcaucggcgugacccagaaugugcuguacgagaaccagaagcagaucgccaaccaguucaacaaggccauuagccagauucaggaaagccugaccaccaccagcaccgcccugggcaaacugcaggacgucgugaaccagaacgcccaggcccugaacacccucgugaagcagcugagcagcaauuucggcgccaucagcuccgugcugaacgauauccugagcagacuggacaagguggaagcagaggugcagaucgaccggcugaucaccggcagacugcagagccugcagaccuacgugacacagcagcugauuagagccgccgagaucagggccagcgccaaucuggccgccacaaagaugagcgagugugugcugggccagagcaagcggguggacuucugcggcaagggcuaucaccugaugagcuucccccaggccgcuccucacggcgugguguuucugcacgugacauacgugcccagccaggaacggaacuucaccaccgccccagccaucugccacgagggcaaggccuacuucccccgggaaggcguguucguguuuaacggcaccuccugguuuaucacccagcggaauuucuucaguccgcagaucaucaccacagacaacaccuucguguccggcagcugcgacgucgugauuggcaucauuaacaacaccguguacgacccccugcagcccgagcuggacagcuucaaagaggaacuggacaaguacuucaagaaccacaccucccccgacguggaccugggcgauaucuccggcaucaaugccagcgucgugaauauccagaaagagaucgaucgccugaacgagguggccaagaaccugaaugagagccugaucgaccugcaggaacuggggaaguacgagcaguacaucaaguggccuugguacguguggcugggcuuuaucgccggccugaucgccaucgugauggucaccauccugcugugcugcaugaccagcuguugcagcugucugaagggcgccugcagcuguggcuccugcugcaaguucgaugaggacgacagcgagccugugcugaaaggcgugaagcugcacuacaccugauaauaggcuggagccucgguggccuagcuucuugccccuugggccuccccccagccccuccuccccuuccugcacccguacccccguggucuuugaauaaagucugagugggcggc

SEQ ID NO: 58 - RNA, 3941 nt, Artificial Sequence
  Synthetic
gggaaauaagagagaaaagaagaguaagaagaaauauaagaccccggcgccgccaccauguucaucuuccuguucuuccugacccugaccagcggcagcgaccuggagagcugcaccaccuucgacgacgugcaggccccuaacuacccucagcacagcagcagcagaagaggcguguacuacccugacgagaucuucagaagcgacacccuguaccugacccaggaccuguuccugccuuucuacagcaacgugaccggcuuccacaccaucaaccacagauucgacaacccugugaucccuuucaaggacggcguguacuucgccgccaccgagaagagcaacguggugagaggcuggguguucggcagcaccaugaacaacaagagccagagcgugaucaucaucaacaacagcaccaacguggugaucagagccugcaacuucgagcugugcgacaacccuuucuucgccgugagcaagccuaccggcacccagacccacaccaugaucuucgacaacgccuucaacugcaccuucgaguacaucagcgacagcuucagccuggacguggccgagaagagcggcaacuucaagcaccugagagaguucguguucaagaacaaggacggcuuccuguacguguacaagggcuaccagccuaucgacguggugagagaccugccuagcggcuucaacauccugaagccuaucuucaagcugccucugggcaucaacaucaccaacuucagagccauccugaccgccuuccugccugcccaggacaccuggggcaccagcgccgccgccuacuucgugggcuaccugaagccugccaccuucaugcugaaguacgacgagaacggcaccaucaccgacgccguggacugcagccagaacccucuggccgagcugaagugcagcgugaagagcuucgagaucgacaagggcaucuaccagaccagcaacuucagaguggccccuagcaaggagguggugagauucccuaacaucaccaaccugugcccuuucggcgagguguucaacgccaccaccuucccuagcguguacgccugggagagaaagagaaucagcaacugcguggccgacuacagcgugcuguacaacagcaccagcuucagcaccuucaagugcuacggcgugagcgccaccaagcugaacgaccugugcuucagcaacguguacgccgacagcuucguggugaagggcgacgacgugagacagaucgccccuggccagaccggcgugaucgccgacuacaacuacaagcugccugacgacuucaccggcugcgugcuggccuggaacaccagaaacaucgacgccacccagaccggcaacuacaacuacaaguacagaagccugagacacggcaagcugagaccuuucgagagagacaucagcaacgugccuuucagcccugacggcaagccuugcaccccuccugccuucaacugcuacuggccucugaacgacuacggcuucuacaucaccaacggcaucggcuaccagccuuacagagugguggugcugagcuucgagcugcugaacgccccugccaccgugugcggcccuaagcugagcaccgaccugaucaagaaccagugcgugaacuucaacuucaacggccugaccggcaccggcgugcugaccccuagcagcaagagauuccagccuuuccagcaguucggcagagacgugcuggacuucaccgacagcgugagagacccuaagaccagcgagauccuggacaucagcccuugcagcuucggcggcgugagcgugaucaccccuggcaccaacaccagcagcgagguggccgugcuguaccaggacgugaacugcaccgacgugccuguggccauccacgccgaccagcugaccccuagcuggagaguguacagcaccggcaacaacguguuccagacccaggccggcugccugaucggcgccgagcacguggacaccagcuacgagugcgacaucccuaucggcgccggcaucugcgccagcuaccacaccgugagcagccugagaagcaccagccagaagagcaucguggccuacaccaugagccugggcgccgacagcagcaucgccuacagcaacaacaccaucgccaucccuaccaacuucagcaucagcaucaccaccgaggugaugccugugagcauggccaagaccagcguggacugcaacauguacaucugcggcgacagcaccgagugcgccaaccugcugcugcaguacggcagcuucugcacccagcugaacagagcccugagcggcaucgccguggagcaggacagaaacaccagagagguguucgcccaggugaagcagauguacaagaccccuacccugaaggacuucggcggcuucaacuucagccagauccugccugacccucugaagccuaccaagagaagcuucaucgaggaccugcuguucaacaaggugacccuggccgacgccggcuucaugaagcaguacggcgagugccugggcgacaucaacgccagagaccugaucugcgcccagaaguucaacggccugaccgugcugccuccucugcugaccgacgacaugaucgccgccuacaccgccgcccuggugagcggcaccgccaccgccggcuggaccuucggcgccggcgccgcccugcagaucccuuucgccaugcagauggccuacagauucaacggcaucggcgugacccagaacgugcuguacgagaaccagaagcagaucgccaaccaguucaacaaggccaucagccagauccaggagagccugaccaccaccagcaccgcccugggcaagcugcaggacguggugaaccagaacgcccaggcccugaacacccuggugaagcagcugagcagcaacuucggcgccaucagcagcgugcugaacgacauccugagcagacuggacccuccugaggccgaggugcagaucgacagacugaucaccggcagacugcagagccugcagaccuacgugacccagcagcugaucagagccgccgagaucagagccagcgccaaccuggccgccaccaagaugagcgagugcgugcugggccagagcaagagaguggacuucugcggcaagggcuaccaccugaugagcuucccucaggccgccccucacggcgugguguuccugcacgugaccuacgugccuagccaggagagaaacuucaccaccgccccugccaucugccacgagggcaaggccuacuucccuagagagggcguguucguguucaacggcaccagcugguucaucacccagagaaacuucuucagcccucagaucaucaccaccgacaacaccuucgugagcggcagcugcgacguggugaucggcaucaucaacaacaccguguacgacccucugcagccugagcuggacagcuucaaggaggagcuggacaaguacuucaagaaccacaccagcccugacguggaccugggcgacaucagcggcaucaacgccagcguggugaacauccagaaggagaucgacagacugaacgagguggccaagaaccugaacgagagccugaucgaccugcaggagcugggcaaguacgagcaguacaucaaguggccuugguacguguggcugggcuucaucgccggccugaucgccaucgugauggugaccauccugcugugcugcaugaccagcugcugcagcugccugaagggcgccugcagcugcggcagcugcugcaaguucgacgaggacgacagcgagccugugcugaagggcgugaagcugcacuacaccugauaauaggcuggagccucgguggccuagcuucuugccccuugggccuccccccagccccuccuccccuuccugcacccguacccccguggucuuugaauaaagucugagugggcggc

SEQ ID NO: 59 - protein, 1353 aa, Artificial Sequence
  Synthetic
MIHSVFLLMFLLTPTESYVDVGPDSVKSACIEVDIQQTFFDKTWPRPIDVSKADGIIYPQGRTYSNITITYQGLFPYQGDHGDMYVYSAGHATGTTPQKLFVANYSQDVKQFANGFVVRIGAAANSTGTVIISPSTSATIRKIYPAFMLGSSVGNFSDGKMGRFFNHTLVLLPDGCGTLLRAFYCILEPRSGNHCPAGNSYTSFATYHTPATDCSDGNYNRNASLNSFKEYFNLRNCTFMYTYNITEDEILEWFGITQTAQGVHLFSSRYVDLYGGNMFQFATLPVYDTIKYYSIIPHSIRSIQSDRKAWAAFYVYKLQPLTFLLDFSVDGYIRRAIDCGFNDLSQLHCSYESFDVESGVYSVSSFEAKPSGSVVEQAEGVECDFSPLLSGTPPQVYNFKRLVFTNCNYNLTKLLSLFSVNDFTCSQISPAAIASNCYSSLILDYFSYPLSMKSDLSVSSAGPISQFNYKQSFSNPTCLILATVPHNLTTITKPLKYSYINKCSRFLSDDRTEVPQLVNANQYSPCVSIVPSTVWEDGDYYRKQLSPLEGGGWLVASGSTVAMTEQLQMGFGITVQYGTDTNSVCPKLEFANDTKIASQLGNCVEYSLYGVSGRGVFQNCTAVGVRQQRFVYDAYQNLVGYYSDDGNYYCLRACVSVPVSVIYDKETKTHATLFGSVACEHISSTMSQYSRSTRSMLKRRDSTYGPLQTPVGCVLGLVNSSLFVEDCKLPLGQSLCALPDTPSTLTPASVGSVPGEMRLASIAFNHPIQVDQLNSSYFKLSIPTNFSFGVTQEYIQTTIQKVTVDCKQYVCNGFQKCEQLLREYGQFCSKINQALHGANLRQDDSVRNLFASVKSSQSSPIIPGFGGDFNLTLLEPVSISTGSRSARSAIEDLLFDKVTIADPGYMQGYDDCMQQGPASARDLICAQYVAGYKVLPPLMDVNMEAAYTSSLLGSIAGVGWTAGLSSFAAIPFAQSIFYRLNGVGITQQVLSENQKLIANKFNQALGAMQTGFTTTNEAFHKVQDAVNNNAQALSKLASELSNTFGAISASIGDIIQRLDPPEQDAQIDRLINGRLTTLNAFVAQQLVRSESAALSAQLAKDKVNECVKAQSKRSGFCGQGTHIVSFVVNAPNGLYFMHVGYYPSNHIEVVSAYGLCDAANPTNCIAPVNGYFIKTNNTRIVDEWSYTGSSFYAPEPITSLNTKYVAPQVTYQNISTNLPPPLLGNSTGIDFQDELDEFFKNVSTSIPNFGSLTQINTTLLDLTYEMLSLQQVVKALNESYIDLKELGNYTYYNKWPWYIWLGFIAGLVALALCVFFILCCTGCGTNCMGKLKCNRCCDRYEEYDLEPHKVHVH

SEQ ID NO: 60 - RNA, 4235 nt, Artificial Sequence
  Synthetic
gggaaauaagagagaaaagaagaguaagaagaaauauaagaccccggcgccgccaccaugauccacagcguguuccugcugauguuccuccuuaccccuaccgagagcuacguggacgucggcccugacagcguuaagagcgcuugcaucgagguggacauccagcagaccuucuucgacaagaccuggccuagaccuaucgacgugagcaaggccgacggcaucaucuacccucagggcagaaccuacagcaacaucaccaucaccuaccagggccuguucccuuaucagggcgaccacggcgacauguacguguacagcgccggccacgccaccggcacaacgccccagaagcuuuucguggccaacuacucccaggacgugaagcaguucgccaacggcuucguggugagaaucggcgccgccgccaacuccacuggaaccgugaucaucagcccuagcaccagcgccaccaucagaaagauuuauccugccuuuaugcugggcuccagcguggguaacuucagcgacggcaagaugggcagauucuucaaccacacccuggugcugcugccugacggcugcggcacccugcugagagccuucuacugcauccuggagccuagaagcggcaaccacugcccugccggcaacagcuacaccagcuucgcaaccuaucacaccccugccaccgacuguucugacgguaacuacaacagaaacgccagccugaacagcuucaaggaguacuucaaccugagaaacugcaccuucauguacaccuauaauaucaccgaggacgagauccucgagugguucggcauaacccagaccgcccaaggcgugcaccuguucagcagcagauacguugaucuguacggcggcaacauguuccaguucgcuacccugccuguguacgacaccaucaaguacuacagcaucaucccucauucuauuagaagcauccagagcgacagaaaggccugggccgcuuucuacguauacaagcugcagccucucacauucuugcucgacuucucuguggacggcuauauccgcagggccaucgacugcggcuucaacgaccugagccagcugcacugcagcuacgagagcuucgacguggagagcggaguuuauuccgugagcagcuucgaggccaagccuagcggcucuguaguggagcaggccgagggcguggagugcgauuucagcccucugcugagcgguaccccuccucagguguacaacuucaagagacugguguucacgaacugcaacuacaaucugaccaaacugcuuucgcuuuucuccgugaacgacuucaccugcagccagauuucuccggcagccaucgccagcaacugcuacagcagcuugauccuugacuacuucagcuacccucugagcaugaaguccgacuuaaguguauccucagccggcccuaucagccaguucaauuacaagcagagcuucagcaacccuaccugccuaauuuuggccaccgugccucacaaccugacuacaauuaccaagccacucaaguauuccuacauuaacaaguguagccgauuccugagcgacgacagaaccgaggugccucagcuggugaacgccaaccaguacagcccuugcgugucgaucgugccaaguaccgugugggaggacggcgacuacuacagaaagcagcugucuccucucgaaggcggcggguggcugguggcaagcggaagcacaguggccaugaccgagcagcugcagaugggcuucggaauuaccgugcaguacggcaccgacaccaauagugucugcccuaagcuggaauucgcgaacgacacuaagauugccucccaacugggaaauugcguagaguacucucuguacggaguguccggcagaggugucuuccagaauugcacagccgugggcgugagacagcagagauucgucuacgacgccuaccagaaccuggugggcuauuauagugacgacggcaacuacuacugccugcgggccugcguuagugugccugucuccguuaucuacgacaaggagacaaagacucacgccacacuuuucggaucugucgccugcgagcacaucaguaguaccaugucucaguauagcagaagcaccaggucuaugcugaagagacgggacucaaccuacggaccacuucagaccccugugggcugcgugcugggccucguaaauagcucucuguuuguggaggacuguaaacugccacugggccagagccugugugcuuuaccugacacaccuaguacacugacaccagcgagcguggguaguguaccaggcgagaugagacuggccagcaucgcuuucaaucacccuauccagguggaccagcucaauuccucuuacuucaagcugagcaucccuaccaauuucucuuucggcgugacccaggaguacauccagaccacaauacagaaggugaccguagauugcaagcaguacguguguaacggauuccagaagugcgagcaauugcucagggaguacggccaguucuguagcaagaucaaccaggcucugcacggggccaaucugcgacaggacgacagcguaagaaaccuguucgccagcguaaagucuagccagucgaguccaaucauaccaggcuucggcggagauuucaaucucaccuuauuggagccaguuuccaucucuacggguucgaggagcgcuaggagcgcaaucgaggaccugcuguucgauaaggucaccaucgccgacccuggcuacaugcagggcuacgacgacugcaugcagcagggcccagccuccgccagagaucugaucugcgcccaguacgucgccggcuacaaggugcugccuccucugauggacguuaacauggaggccgccuauacuaguagucuucugggaagcauugcaggcgugggcuggaccgccggccugucuagcuucgcggccauaccuuucgcccagagcaucuucuacagacugaacggugugggcaucacacaacagguacugucugagaaucagaagcugaucgccaacaaguucaaucaggcacuuggcgccaugcagaccggcuucaccaccaccaacgaggccuuccacaagguccaggacgccgugaacaacaacgcucaggccuugagcaaguuagcgagcgaacuuagcaacaccuucggcgccaucagugcaagcauuggagacauuauccagaggcucgacccuccugagcaggacgcucagaucgaucgguugaucaacggcagacugaccacucugaacgccuucguugcccaacaacuggugcggucugagagcgccgcuuuauccgcccagcuggccaaggacaagguuaacgagugcgugaaggcacagucgaagcguucaggauucugcggccagggcacccacaucgugagcuucgucgugaacgccccuaacggccuguacuucaugcacgucggauauuacccuagcaaccauauugaaguggugagcgcguacggccucugugacgcagcuaauccuacaaacugcaucgccccugugaacgguuacuucaucaagaccaacaacaccagaaucguggacgaguggucauacacgggcaguucauucuacgccccugagccgaucacuagccuuaacaccaaguacguggccccacaagugacauaccagaacauuagcacaaaccugccuccaccgcuguuagguaacagcacgggcaucgacuuccaggacgaauuagacgaguucuucaagaacguguccaccagcaucccaaacuucggcagccugacccagaucaacacaaccuuacucgaccugaccuacgagaugcugagccuccagcagguugucaaggcccucaacgaaucauauaucgacuugaaggagcuuggcaauuacacuuacuacaacaaguggccuugguacaucuggcucggcuucaucgccgggcuggucgcccucgcccugugcgucuucuucauccugugcugcacagguuguggaaccaacuguaugggcaagcugaagugcaaccguugcugugauagauacgaggaguacgaucuggaaccacauaaggugcacgugcacugauaauaggcuggagccucgguggccuagcuucuugccccuugggccuccccccagccccuccuccccuuccugcacccguacccccguggucuuugaauaaagucugagugggcggc

SEQ ID NO: 61 - RNA, 4059 nt, Artificial Sequence
  Synthetic
augauccacagcguguuccugcugauguuccuccuuaccccuaccgagagcuacguggacgucggcccugacagcguuaagagcgcuugcaucgagguggacauccagcagaccuucuucgacaagaccuggccuagaccuaucgacgugagcaaggccgacggcaucaucuacccucagggcagaaccuacagcaacaucaccaucaccuaccagggccuguucccuuaucagggcgaccacggcgacauguacguguacagcgccggccacgccaccggcacaacgccccagaagcuuuucguggccaacuacucccaggacgugaagcaguucgccaacggcuucguggugagaaucggcgccgccgccaacuccacuggaaccgugaucaucagcccuagcaccagcgccaccaucagaaagauuuauccugccuuuaugcugggcuccagcguggguaacuucagcgacggcaagaugggcagauucuucaaccacacccuggugcugcugccugacggcugcggcacccugcugagagccuucuacugcauccuggagccuagaagcggcaaccacugcccugccggcaacagcuacaccagcuucgcaaccuaucacaccccugccaccgacuguucugacgguaacuacaacagaaacgccagccugaacagcuucaaggaguacuucaaccugagaaacugcaccuucauguacaccuauaauaucaccgaggacgagauccucgagugguucggcauaacccagaccgcccaaggcgugcaccuguucagcagcagauacguugaucuguacggcggcaacauguuccaguucgcuacccugccuguguacgacaccaucaaguacuacagcaucaucccucauucuauuagaagcauccagagcgacagaaaggccugggccgcuuucuacguauacaagcugcagccucucacauucuugcucgacuucucuguggacggcuauauccgcagggccaucgacugcggcuucaacgaccugagccagcugcacugcagcuacgagagcuucgacguggagagcggaguuuauuccgugagcagcuucgaggccaagccuagcggcucuguaguggagcaggccgagggcguggagugcgauuucagcccucugcugagcgguaccccuccucagguguacaacuucaagagacugguguucacgaacugcaacuacaaucugaccaaacugcuuucgcuuuucuccgugaacgacuucaccugcagccagauuucuccggcagccaucgccagcaacugcuacagcagcuugauccuugacuacuucagcuacccucugagcaugaaguccgacuuaaguguauccucagccggcccuaucagccaguucaauuacaagcagagcuucagcaacccuaccugccuaauuuuggccaccgugccucacaaccugacuacaauuaccaagccacucaaguauuccuacauuaacaaguguagccgauuccugagcgacgacagaaccgaggugccucagcuggugaacgccaaccaguacagcccuugcgugucgaucgugccaaguaccgugugggaggacggcgacuacuacagaaagcagcugucuccucucgaaggcggcggguggcugguggcaagcggaagcacaguggccaugaccgagcagcugcagaugggcuucggaauuaccgugcaguacggcaccgacaccaauagugucugcccuaagcuggaauucgcgaacgacacuaagauugccucccaacugggaaauugcguagaguacucucuguacggaguguccggcagaggugucuuccagaauugcacagccgugggcgugagacagcagagauucgucuacgacgccuaccagaaccuggugggcuauuauagugacgacggcaacuacuacugccugcgggccugcguuagugugccugucuccguuaucuacgacaaggagacaaagacucacgccacacuuuucggaucugucgccugcgagcacaucaguaguaccaugucucaguauagcagaagcaccaggucuaugcugaagagacgggacucaaccuacggaccacuucagaccccugugggcugcgugcugggccucguaaauagcucucuguuuguggaggacuguaaacugccacugggccagagccugugugcuuuaccugacacaccuaguacacugacaccagcgagcguggguaguguaccaggcgagaugagacuggccagcaucgcuuucaaucacccuauccagguggaccagcucaauuccucuuacuucaagcugagcaucccuaccaauuucucuuucggcgugacccaggaguacauccagaccacaauacagaaggugaccguagauugcaagcaguacguguguaacggauuccagaagugcgagcaauugcucagggaguacggccaguucuguagcaagaucaaccaggcucugcacggggccaaucugcgacaggacgacagcguaagaaaccuguucgccagcguaaagucuagccagucgaguccaaucauaccaggcuucggcggagauuucaaucucaccuuauuggagccaguuuccaucucuacggguucgaggagcgcuaggagcgcaaucgaggaccugcuguucgauaaggucaccaucgccgacccuggcuacaugcagggcuacgacgacugcaugcagcagggcccagccuccgccagagaucugaucugcgcccaguacgucgccggcuacaaggugcugccuccucugauggacguuaacauggaggccgccuauacuaguagucuucugggaagcauugcaggcgugggcuggaccgccggccugucuagcuucgcggccauaccuuucgcccagagcaucuucuacagacugaacggugugggcaucacacaacagguacugucugagaaucagaagcugaucgccaacaaguucaaucaggcacuuggcgccaugcagaccggcuucaccaccaccaacgaggccuuccacaagguccaggacgccgugaacaacaacgcucaggccuugagcaaguuagcgagcgaacuuagcaacaccuucggcgccaucagugcaagcauuggagacauuauccagaggcucgacccuccugagcaggacgcucagaucgaucgguugaucaacggcagacugaccacucugaacgccuucguugcccaacaacuggugcggucugagagcgccgcuuuauccgcccagcuggccaaggacaagguuaacgagugcgugaaggcacagucgaagcguucaggauucugcggccagggcacccacaucgugagcuucgucgugaacgccccuaacggccuguacuucaugcacgucggauauuacccuagcaaccauauugaaguggugagcgcguacggccucugugacgcagcuaauccuacaaacugcaucgccccugugaacgguuacuucaucaagaccaacaacaccagaaucguggacgaguggucauacacgggcaguucauucuacgccccugagccgaucacuagccuuaacaccaaguacguggccccacaagugacauaccagaacauuagcacaaaccugccuccaccgcuguuagguaacagcacgggcaucgacuuccaggacgaauuagacgaguucuucaagaacguguccaccagcaucccaaacuucggcagccugacccagaucaacacaaccuuacucgaccugaccuacgagaugcugagccuccagcagguugucaaggcccucaacgaaucauauaucgacuugaaggagcuuggcaauuacacuuacuacaacaaguggccuugguacaucuggcucggcuucaucgccgggcuggucgcccucgcccugugcgucuucuucauccugugcugcacagguuguggaaccaacuguaugggcaagcugaagugcaaccguugcugugauagauacgaggaguacgaucuggaaccacauaaggugcacgugcac

SEQ ID NO: 62 - RNA, 3693 nt, Artificial Sequence
  Synthetic
auguucguguuccuggugcugcugccccuggugagcagccagugcgugaaccugaccacccggacccagcugccaccagccuacaccaacagcuucacccggggcgucuacuaccccgacaagguguuccggagcagcguccugcacagcacccaggaccuguuccugcccuucuucagcaacgugaccugguuccacgccauccacgugagcggcaccaacggcaccaagcgguucgacaaccccgugcugcccuucaacgacggcguguacuucgccagcaccgagaagagcaacaucauccggggcuggaucuucggcaccacccuggacagcaagacccagagccugcugaucgugaauaacgccaccaacguggugaucaaggugugcgaguuccaguucugcaacgaccccuuccugggcguguacuaccacaagaacaacaagagcuggauggagagcgaguuccggguguacagcagcgccaacaacugcaccuucgaguacgugagccagcccuuccugauggaccuggagggcaagcagggcaacuucaagaaccugcgggaguucguguucaagaacaucgacggcuacuucaagaucuacagcaagcacaccccaaucaaccuggugcgggaucugccccagggcuucucagcccuggagccccugguggaccugcccaucggcaucaacaucacccgguuccagacccugcuggcccugcaccggagcuaccugaccccaggcgacagcagcagcggguggacagcaggcgcggcugcuuacuacgugggcuaccugcagccccggaccuuccugcugaaguacaacgagaacggcaccaucaccgacgccguggacugcgcccuggacccucugagcgagaccaagugcacccugaagagcuucaccguggagaagggcaucuaccagaccagcaacuuccgggugcagcccaccgagagcaucgugcgguuccccaacaucaccaaccugugccccuucggcgagguguucaacgccacccgguucgccagcguguacgccuggaaccggaagcggaucagcaacugcguggccgacuacagcgugcuguacaacagcgccagcuucagcaccuucaagugcuacggcgugagccccaccaagcugaacgaccugugcuucaccaacguguacgccgacagcuucgugauccguggcgacgaggugcggcagaucgcacccggccagacaggcaagaucgccgacuacaacuacaagcugcccgacgacuucaccggcugcgugaucgccuggaacagcaacaaccucgacagcaaggugggcggcaacuacaacuaccuguaccggcuguuccggaagagcaaccugaagcccuucgagcgggacaucagcaccgagaucuaccaagccggcuccaccccuugcaacggcguggagggcuucaacugcuacuucccucugcagagcuacggcuuccagcccaccaacggcgugggcuaccagcccuaccgggugguggugcugagcuucgagcugcugcacgccccagccaccguguguggccccaagaagagcaccaaccuggugaagaacaagugcgugaacuucaacuucaacggccuuaccggcaccggcgugcugaccgagagcaacaagaaauuccugcccuuucagcaguucggccgggacaucgccgacaccaccgacgcugugcgggauccccagacccuggagauccuggacaucaccccuugcagcuucggcggcgugagcgugaucaccccaggcaccaacaccagcaaccagguggccgugcuguaccaggacgugaacugcaccgaggugcccguggccauccacgccgaccagcugacacccaccuggcgggucuacagcaccggcagcaacguguuccagacccgggccgguugccugaucggcgccgagcacgugaacaacagcuacgagugcgacauccccaucggcgccggcaucugugccagcuaccagacccagaccgugucacugaggagcguggccagccagagcaucaucgccuacaccaugagccugggcgccgagaacagcguggccuacagcaacaacagcaucgccauccccaccaacuucaccaucagcgugaccaccgagauucugcccgugagcaugaccaagaccagcguggacugcaccauguacaucugcggcgacagcaccgagugcagcaaccugcugcugcaguacggcagcuucugcacccagcugaaccgggcccugaccggcaucgccguggagcaggacaagaacacccaggagguguucgcccaggugaagcagaucuacaagaccccucccaucaaggacuucggcggcuucaacuucagccagauccugcccgaccccagcaagcccagcaagcggagcuucaucgaggaccugcuguucaacaaggugacccuagccgacgccggcuucaucaagcaguacggcgacugccucggcgacauagccgcccgggaccugaucugcgcccagaaguucaacggccugaccgugcugccuccccugcugaccgacgagaugaucgcccaguacaccagcgcccuguuagccggaaccaucaccagcggcuggacuuucggcgcuggagccgcucugcagauccccuucgccaugcagauggccuaccgguucaacggcaucggcgugacccagaacgugcuguacgagaaccagaagcugaucgccaaccaguucaacagcgccaucggcaagauccaggacagccugagcagcaccgcuagcgcccugggcaagcugcaggacguggugaaccagaacgcccaggcccugaacacccuggugaagcagcugagcagcaacuucggcgccaucagcagcgugcugaacgacauccugagccggcuggacaagguggaggccgaggugcagaucgaccggcugaucacuggccggcugcagagccugcagaccuacgugacccagcagcugauccgggccgccgagauucgggccagcgccaaccuggccgccaccaagaugagcgagugcgugcugggccagagcaagcggguggacuucugcggcaagggcuaccaccugaugagcuuuccccagagcgcaccccacggagugguguuccugcacgugaccuacgugcccgcccaggagaagaacuucaccaccgccccagccaucugccacgacggcaaggcccacuuuccccgggagggcguguucgugagcaacggcacccacugguucgugacccagcggaacuucuacgagccccagaucaucaccaccgacaacaccuucgugagcggcaacugcgacguggugaucggcaucgugaacaacaccguguacgauccccugcagcccgagcuggacagcuucaaggaggagcuggacaaguacuucaagaaucacaccagccccgacguggaccugggcgacaucagcggcaucaacgccagcguggugaacauccagaaggagaucgaucggcugaacgagguggccaagaaccugaacgagagccugaucgaccugcaggagcugggcaaguacgagcaguacaucaaguggcccugguacaucuggcugggcuucaucgccggccugaucgccaucgugauggugaccaucaugcug

SEQ ID NO: 63 - protein, 1231 aa, Artificial Sequence
  Synthetic
MFVFLVLLPLVSSQCVNLTTRTQLPPAYTNSFTRGVYYPDKVFRSSVLHSTQDLFLPFFSNVTWFHAIHVSGTNGTKRFDNPVLPFNDGVYFASTEKSNIIRGWIFGTTLDSKTQSLLIVNNATNVVIKVCEFQFCNDPFLGVYYHKNNKSWMESEFRVYSSANNCTFEYVSQPFLMDLEGKQGNFKNLREFVFKNIDGYFKIYSKHTPINLVRDLPQGFSALEPLVDLPIGINITRFQTLLALHRSYLTPGDSSSGWTAGAAAYYVGYLQPRTFLLKYNENGTITDAVDCALDPLSETKCTLKSFTVEKGIYQTSNFRVQPTESIVRFPNITNLCPFGEVFNATRFASVYAWNRKRISNCVADYSVLYNSASFSTFKCYGVSPTKLNDLCFTNVYADSFVIRGDEVRQIAPGQTGKIADYNYKLPDDFTGCVIAWNSNNLDSKVGGNYNYLYRLFRKSNLKPFERDISTEIYQAGSTPCNGVEGFNCYFPLQSYGFQPTNGVGYQPYRVVVLSFELLHAPATVCGPKKSTNLVKNKCVNFNFNGLTGTGVLTESNKKFLPFQQFGRDIADTTDAVRDPQTLEILDITPCSFGGVSVITPGTNTSNQVAVLYQDVNCTEVPVAIHADQLTPTWRVYSTGSNVFQTRAGCLIGAEHVNNSYECDIPIGAGICASYQTQTVSLRSVASQSIIAYTMSLGAENSVAYSNNSIAIPTNFTISVTTEILPVSMTKTSVDCTMYICGDSTECSNLLLQYGSFCTQLNRALTGIAVEQDKNTQEVFAQVKQIYKTPPIKDFGGFNFSQILPDPSKPSKRSFIEDLLFNKVTLADAGFIKQYGDCLGDIAARDLICAQKFNGLTVLPPLLTDEMIAQYTSALLAGTITSGWTFGAGAALQIPFAMQMAYRFNGIGVTQNVLYENQKLIANQFNSAIGKIQDSLSSTASALGKLQDVVNQNAQALNTLVKQLSSNFGAISSVLNDILSRLDKVEAEVQIDRLITGRLQSLQTYVTQQLIRAAEIRASANLAATKMSECVLGQSKRVDFCGKGYHLMSFPQSAPHGVVFLHVTYVPAQEKNFTTAPAICHDGKAHFPREGVFVSNGTHWFVTQRNFYEPQIITTDNTFVSGNCDVVIGIVNNTVYDPLQPELDSFKEELDKYFKNHTSPDVDLGDISGINASVVNIQKEIDRLNEVAKNLNESLIDLQELGKYEQYIKWPWYIWLGFIAGLIAIVMVTIML

SEQ ID NO: 64 - RNA, 3870 nt, Artificial Sequence
  Synthetic
auguucguguuccuggugcugcugccccuggugagcagccagugcgugaaccugaccacccggacccagcugccaccagccuacaccaacagcuucacccggggcgucuacuaccccgacaagguguuccggagcagcguccugcacagcacccaggaccuguuccugcccuucuucagcaacgugaccugguuccacgccauccacgugagcggcaccaacggcaccaagcgguucgacaaccccgugcugcccuucaacgacggcguguacuucgccagcaccgagaagagcaacaucauccggggcuggaucuucggcaccacccuggacagcaagacccagagccugcugaucgugaauaacgccaccaacguggugaucaaggugugcgaguuccaguucugcaacgaccccuuccugggcguguacuaccacaagaacaacaagagcuggauggagagcgaguuccggguguacagcagcgccaacaacugcaccuucgaguacgugagccagcccuuccugauggaccuggagggcaagcagggcaacuucaagaaccugcgggaguucguguucaagaacaucgacggcuacuucaagaucuacagcaagcacaccccaaucaaccuggugcgggaucugccccagggcuucucagcccuggagccccugguggaccugcccaucggcaucaacaucacccgguuccagacccugcuggcccugcaccggagcuaccugaccccaggcgacagcagcagcggguggacagcaggcgcggcugcuuacuacgugggcuaccugcagccccggaccuuccugcugaaguacaacgagaacggcaccaucaccgacgccguggacugcgcccuggacccucugagcgagaccaagugcacccugaagagcuucaccguggagaagggcaucuaccagaccagcaacuuccgggugcagcccaccgagagcaucgugcgguuccccaacaucaccaaccugugccccuucggcgagguguucaacgccacccgguucgccagcguguacgccuggaaccggaagcggaucagcaacugcguggccgacuacagcgugcuguacaacagcgccagcuucagcaccuucaagugcuacggcgugagccccaccaagcugaacgaccugugcuucaccaacguguacgccgacagcuucgugauccguggcgacgaggugcggcagaucgcacccggccagacaggcaagaucgccgacuacaacuacaagcugcccgacgacuucaccggcugcgugaucgccuggaacagcaacaaccucgacagcaaggugggcggcaacuacaacuaccuguaccggcuguuccggaagagcaaccugaagcccuucgagcgggacaucagcaccgagaucuaccaagccggcuccaccccuugcaacggcguggagggcuucaacugcuacuucccucugcagagcuacggcuuccagcccaccaacggcgugggcuaccagcccuaccgggugguggugcugagcuucgagcugcugcacgccccagccaccguguguggccccaagaagagcaccaaccuggugaagaacaagugcgugaacuucaacuucaacggccuuaccggcaccggcgugcugaccgagagcaacaagaaauuccugcccuuucagcaguucggccgggacaucgccgacaccaccgacgcugugcgggauccccagacccuggagauccuggacaucaccccuugcagcuucggcggcgugagcgugaucaccccaggcaccaacaccagcaaccagguggccgugcuguaccaggacgugaacugcaccgaggugcccguggccauccacgccgaccagcugacacccaccuggcgggucuacagcaccggcagcaacguguuccagacccgggccgguugccugaucggcgccgagcacgugaacaacagcuacgagugcgacauccccaucggcgccggcaucugugccagcuaccagacccagaccgugucacugaggagcguggccagccagagcaucaucgccuacaccaugagccugggcgccgagaacagcguggccuacagcaacaacagcaucgccauccccaccaacuucaccaucagcgugaccaccgagauucugcccgugagcaugaccaagaccagcguggacugcaccauguacaucugcggcgacagcaccgagugcagcaaccugcugcugcaguacggcagcuucugcacccagcugaaccgggcccugaccggcaucgccguggagcaggacaagaacacccaggagguguucgcccaggugaagcagaucuacaagaccccucccaucaaggacuucggcggcuucaacuucagccagauccugcccgaccccagcaagcccagcaagcggagcuucaucgaggaccugcuguucaacaaggugacccuagccgacgccggcuucaucaagcaguacggcgacugccucggcgacauagccgcccgggaccugaucugcgcccagaaguucaacggccugaccgugcugccuccccugcugaccgacgagaugaucgcccaguacaccagcgcccuguuagccggaaccaucaccagcggcuggacuuucggcgcuggagccgcucugcagauccccuucgccaugcagauggccuaccgguucaacggcaucggcgugacccagaacgugcuguacgagaaccagaagcugaucgccaaccaguucaacagcgccaucggcaagauccaggacagccugagcagcaccgcuagcgcccugggcaagcugcaggacguggugaaccagaacgcccaggcccugaacacccuggugaagcagcugagcagcaacuucggcgccaucagcagcgugcugaacgacauccugagccggcuggacaagguggaggccgaggugcagaucgaccggcugaucacuggccggcugcagagccugcagaccuacgugacccagcagcugauccgggccgccgagauucgggccagcgccaaccuggccgccaccaagaugagcgagugcgugcugggccagagcaagcggguggacuucugcggcaagggcuaccaccugaugagcuuuccccagagcgcaccccacggagugguguuccugcacgugaccuacgugcccgcccaggagaagaacuucaccaccgccccagccaucugccacgacggcaaggcccacuuuccccgggagggcguguucgugagcaacggcacccacugguucgugacccagcggaacuucuacgagccccagaucaucaccaccgacaacaccuucgugagcggcaacugcgacguggugaucggcaucgugaacaacaccguguacgauccccugcagcccgagcuggacagcuucaaggaggagcuggacaaguacuucaagaaucacaccagccccgacguggaccugggcgacaucagcggcaucaacgccagcguggugaacauccagaaggagaucgaucggcugaacgagguggccaagaaccugaacgagagccugaucgaccugcaggagcugggcaaguacgagcaguacaucaaguggcccugguacaucuggcugggcuucaucgccggccugaucgccaucgugauggugaccaucaugcugaagaagaagaagcggccacggaacuccuacaagugcggcaccaacaccauggagcgggaggagagcgagcagaccaagaagcgggagaagauccacauuccugaacgguccgacgaagcccagcggguguucaagagcagcaagaccagcagcugcgacaagagcgacaccugcuuc

SEQ ID NO: 65 - protein, 1290 aa, Artificial Sequence
  Synthetic
MFVFLVLLPLVSSQCVNLTTRTQLPPAYTNSFTRGVYYPDKVFRSSVLHSTQDLFLPFFSNVTWFHAIHVSGTNGTKRFDNPVLPFNDGVYFASTEKSNIIRGWIFGTTLDSKTQSLLIVNNATNVVIKVCEFQFCNDPFLGVYYHKNNKSWMESEFRVYSSANNCTFEYVSQPFLMDLEGKQGNFKNLREFVFKNIDGYFKIYSKHTPINLVRDLPQGFSALEPLVDLPIGINITRFQTLLALHRSYLTPGDSSSGWTAGAAAYYVGYLQPRTFLLKYNENGTITDAVDCALDPLSETKCTLKSFTVEKGIYQTSNFRVQPTESIVRFPNITNLCPFGEVFNATRFASVYAWNRKRISNCVADYSVLYNSASFSTFKCYGVSPTKLNDLCFTNVYADSFVIRGDEVRQIAPGQTGKIADYNYKLPDDFTGCVIAWNSNNLDSKVGGNYNYLYRLFRKSNLKPFERDISTEIYQAGSTPCNGVEGFNCYFPLQSYGFQPTNGVGYQPYRVVVLSFELLHAPATVCGPKKSTNLVKNKCVNFNFNGLTGTGVLTESNKKFLPFQQFGRDIADTTDAVRDPQTLEILDITPCSFGGVSVITPGTNTSNQVAVLYQDVNCTEVPVAIHADQLTPTWRVYSTGSNVFQTRAGCLIGAEHVNNSYECDIPIGAGICASYQTQTVSLRSVASQSIIAYTMSLGAENSVAYSNNSIAIPTNFTISVTTEILPVSMTKTSVDCTMYICGDSTECSNLLLQYGSFCTQLNRALTGIAVEQDKNTQEVFAQVKQIYKTPPIKDFGGFNFSQILPDPSKPSKRSFIEDLLFNKVTLADAGFIKQYGDCLGDIAARDLICAQKFNGLTVLPPLLTDEMIAQYTSALLAGTITSGWTFGAGAALQIPFAMQMAYRFNGIGVTQNVLYENQKLIANQFNSAIGKIQDSLSSTASALGKLQDVVNQNAQALNTLVKQLSSNFGAISSVLNDILSRLDKVEAEVQIDRLITGRLQSLQTYVTQQLIRAAEIRASANLAATKMSECVLGQSKRVDFCGKGYHLMSFPQSAPHGVVFLHVTYVPAQEKNFTTAPAICHDGKAHFPREGVFVSNGTHWFVTQRNFYEPQIITTDNTFVSGNCDVVIGIVNNTVYDPLQPELDSFKEELDKYFKNHTSPDVDLGDISGINASVVNIQKEIDRLNEVAKNLNESLIDLQELGKYEQYIKWPWYIWLGFIAGLIAIVMVTIMLKKKKRPRNSYKCGTNTMEREESEQTKKREKIHIPERSDEAQRVFKSSKTSSCDKSDTCF

SEQ ID NO: 66 - RNA, 3750 nt, Artificial Sequence
  Synthetic
auguucguguuccuggugcugcugccccuggugagcagccagugcgugaaccugaccacccggacccagcugccaccagccuacaccaacagcuucacccggggcgucuacuaccccgacaagguguuccggagcagcguccugcacagcacccaggaccuguuccugcccuucuucagcaacgugaccugguuccacgccauccacgugagcggcaccaacggcaccaagcgguucgacaaccccgugcugcccuucaacgacggcguguacuucgccagcaccgagaagagcaacaucauccggggcuggaucuucggcaccacccuggacagcaagacccagagccugcugaucgugaauaacgccaccaacguggugaucaaggugugcgaguuccaguucugcaacgaccccuuccugggcguguacuaccacaagaacaacaagagcuggauggagagcgaguuccggguguacagcagcgccaacaacugcaccuucgaguacgugagccagcccuuccugauggaccuggagggcaagcagggcaacuucaagaaccugcgggaguucguguucaagaacaucgacggcuacuucaagaucuacagcaagcacaccccaaucaaccuggugcgggaucugccccagggcuucucagcccuggagccccugguggaccugcccaucggcaucaacaucacccgguuccagacccugcuggcccugcaccggagcuaccugaccccaggcgacagcagcagcggguggacagcaggcgcggcugcuuacuacgugggcuaccugcagccccggaccuuccugcugaaguacaacgagaacggcaccaucaccgacgccguggacugcgcccuggacccucugagcgagaccaagugcacccugaagagcuucaccguggagaagggcaucuaccagaccagcaacuuccgggugcagcccaccgagagcaucgugcgguuccccaacaucaccaaccugugccccuucggcgagguguucaacgccacccgguucgccagcguguacgccuggaaccggaagcggaucagcaacugcguggccgacuacagcgugcuguacaacagcgccagcuucagcaccuucaagugcuacggcgugagccccaccaagcugaacgaccugugcuucaccaacguguacgccgacagcuucgugauccguggcgacgaggugcggcagaucgcacccggccagacaggcaagaucgccgacuacaacuacaagcugcccgacgacuucaccggcugcgugaucgccuggaacagcaacaaccucgacagcaaggugggcggcaacuacaacuaccuguaccggcuguuccggaagagcaaccugaagcccuucgagcgggacaucagcaccgagaucuaccaagccggcuccaccccuugcaacggcguggagggcuucaacugcuacuucccucugcagagcuacggcuuccagcccaccaacggcgugggcuaccagcccuaccgggugguggugcugagcuucgagcugcugcacgccccagccaccguguguggccccaagaagagcaccaaccuggugaagaacaagugcgugaacuucaacuucaacggccuuaccggcaccggcgugcugaccgagagcaacaagaaauuccugcccuuucagcaguucggccgggacaucgccgacaccaccgacgcugugcgggauccccagacccuggagauccuggacaucaccccuugcagcuucggcggcgugagcgugaucaccccaggcaccaacaccagcaaccagguggccgugcuguaccaggacgugaacugcaccgaggugcccguggccauccacgccgaccagcugacacccaccuggcgggucuacagcaccggcagcaacguguuccagacccgggccgguugccugaucggcgccgagcacgugaacaacagcuacgagugcgacauccccaucggcgccggcaucugugccagcuaccagacccagaccgugucacugaggagcguggccagccagagcaucaucgccuacaccaugagccugggcgccgagaacagcguggccuacagcaacaacagcaucgccauccccaccaacuucaccaucagcgugaccaccgagauucugcccgugagcaugaccaagaccagcguggacugcaccauguacaucugcggcgacagcaccgagugcagcaaccugcugcugcaguacggcagcuucugcacccagcugaaccgggcccugaccggcaucgccguggagcaggacaagaacacccaggagguguucgcccaggugaagcagaucuacaagaccccucccaucaaggacuucggcggcuucaacuucagccagauccugcccgaccccagcaagcccagcaagcggagcuucaucgaggaccugcuguucaacaaggugacccuagccgacgccggcuucaucaagcaguacggcgacugccucggcgacauagccgcccgggaccugaucugcgcccagaaguucaacggccugaccgugcugccuccccugcugaccgacgagaugaucgcccaguacaccagcgcccuguuagccggaaccaucaccagcggcuggacuuucggcgcuggagccgcucugcagauccccuucgccaugcagauggccuaccgguucaacggcaucggcgugacccagaacgugcuguacgagaaccagaagcugaucgccaaccaguucaacagcgccaucggcaagauccaggacagccugagcagcaccgcuagcgcccugggcaagcugcaggacguggugaaccagaacgcccaggcccugaacacccuggugaagcagcugagcagcaacuucggcgccaucagcagcgugcugaacgacauccugagccggcuggacaagguggaggccgaggugcagaucgaccggcugaucacuggccggcugcagagccugcagaccuacgugacccagcagcugauccgggccgccgagauucgggccagcgccaaccuggccgccaccaagaugagcgagugcgugcugggccagagcaagcggguggacuucugcggcaagggcuaccaccugaugagcuuuccccagagcgcaccccacggagugguguuccugcacgugaccuacgugcccgcccaggagaagaacuucaccaccgccccagccaucugccacgacggcaaggcccacuuuccccgggagggcguguucgugagcaacggcacccacugguucgugacccagcggaacuucuacgagccccagaucaucaccaccgacaacaccuucgugagcggcaacugcgacguggugaucggcaucgugaacaacaccguguacgauccccugcagcccgagcuggacagcuucaaggaggagcuggacaaguacuucaagaaucacaccagccccgacguggaccugggcgacaucagcggcaucaacgccagcguggugaacauccagaaggagaucgaucggcugaacgagguggccaagaaccugaacgagagccugaucgaccugcaggagcugggcaaguacgagcaguacaucaaguggcccugguacaucuggcugggcuucaucgccggccugaucgccaucgugauggugaccaucaugcugaagcggcaguacaaggacaugaugagcgagggaggaccaccuggcgcugagccacag

SEQ ID NO: 67 - protein, 1250 aa, Artificial Sequence
  Synthetic
MFVFLVLLPLVSSQCVNLTTRTQLPPAYTNSFTRGVYYPDKVFRSSVLHSTQDLFLPFFSNVTWFHAIHVSGTNGTKRFDNPVLPFNDGVYFASTEKSNIIRGWIFGTTLDSKTQSLLIVNNATNVVIKVCEFQFCNDPFLGVYYHKNNKSWMESEFRVYSSANNCTFEYVSQPFLMDLEGKQGNFKNLREFVFKNIDGYFKIYSKHTPINLVRDLPQGFSALEPLVDLPIGINITRFQTLLALHRSYLTPGDSSSGWTAGAAAYYVGYLQPRTFLLKYNENGTITDAVDCALDPLSETKCTLKSFTVEKGIYQTSNFRVQPTESIVRFPNITNLCPFGEVFNATRFASVYAWNRKRISNCVADYSVLYNSASFSTFKCYGVSPTKLNDLCFTNVYADSFVIRGDEVRQIAPGQTGKIADYNYKLPDDFTGCVIAWNSNNLDSKVGGNYNYLYRLFRKSNLKPFERDISTEIYQAGSTPCNGVEGFNCYFPLQSYGFQPTNGVGYQPYRVVVLSFELLHAPATVCGPKKSTNLVKNKCVNFNFNGLTGTGVLTESNKKFLPFQQFGRDIADTTDAVRDPQTLEILDITPCSFGGVSVITPGTNTSNQVAVLYQDVNCTEVPVAIHADQLTPTWRVYSTGSNVFQTRAGCLIGAEHVNNSYECDIPIGAGICASYQTQTVSLRSVASQSIIAYTMSLGAENSVAYSNNSIAIPTNFTISVTTEILPVSMTKTSVDCTMYICGDSTECSNLLLQYGSFCTQLNRALTGIAVEQDKNTQEVFAQVKQIYKTPPIKDFGGFNFSQILPDPSKPSKRSFIEDLLFNKVTLADAGFIKQYGDCLGDIAARDLICAQKFNGLTVLPPLLTDEMIAQYTSALLAGTITSGWTFGAGAALQIPFAMQMAYRFNGIGVTQNVLYENQKLIANQFNSAIGKIQDSLSSTASALGKLQDVVNQNAQALNTLVKQLSSNFGAISSVLNDILSRLDKVEAEVQIDRLITGRLQSLQTYVTQQLIRAAEIRASANLAATKMSECVLGQSKRVDFCGKGYHLMSFPQSAPHGVVFLHVTYVPAQEKNFTTAPAICHDGKAHFPREGVFVSNGTHWFVTQRNFYEPQIITTDNTFVSGNCDVVIGIVNNTVYDPLQPELDSFKEELDKYFKNHTSPDVDLGDISGINASVVNIQKEIDRLNEVAKNLNESLIDLQELGKYEQYIKWPWYIWLGFIAGLIAIVMVTIMLKRQYKDMMSEGGPPGAEPQ

SEQ ID NO: 68 - RNA, 3693 nt, Artificial Sequence
  Synthetic
auguucguguuccuggugcugcugccccuggugagcagccagugcgugaaccugaccacccggacccagcugccaccagccuacaccaacagcuucacccggggcgucuacuaccccgacaagguguuccggagcagcguccugcacagcacccaggaccuguuccugcccuucuucagcaacgugaccugguuccacgccauccacgugagcggcaccaacggcaccaagcgguucgacaaccccgugcugcccuucaacgacggcguguacuucgccagcaccgagaagagcaacaucauccggggcuggaucuucggcaccacccuggacagcaagacccagagccugcugaucgugaauaacgccaccaacguggugaucaaggugugcgaguuccaguucugcaacgaccccuuccugggcguguacuaccacaagaacaacaagagcuggauggagagcgaguuccggguguacagcagcgccaacaacugcaccuucgaguacgugagccagcccuuccugauggaccuggagggcaagcagggcaacuucaagaaccugcgggaguucguguucaagaacaucgacggcuacuucaagaucuacagcaagcacaccccaaucaaccuggugcgggaucugccccagggcuucucagcccuggagccccugguggaccugcccaucggcaucaacaucacccgguuccagacccugcuggcccugcaccggagcuaccugaccccaggcgacagcagcagcggguggacagcaggcgcggcugcuuacuacgugggcuaccugcagccccggaccuuccugcugaaguacaacgagaacggcaccaucaccgacgccguggacugcgcccuggacccucugagcgagaccaagugcacccugaagagcuucaccguggagaagggcaucuaccagaccagcaacuuccgggugcagcccaccgagagcaucgugcgguuccccaacaucaccaaccugugccccuucggcgagguguucaacgccacccgguucgccagcguguacgccuggaaccggaagcggaucagcaacugcguggccgacuacagcgugcuguacaacagcgccagcuucagcaccuucaagugcuacggcgugagccccaccaagcugaacgaccugugcuucaccaacguguacgccgacagcuucgugauccguggcgacgaggugcggcagaucgcacccggccagacaggcaagaucgccgacuacaacuacaagcugcccgacgacuucaccggcugcgugaucgccuggaacagcaacaaccucgacagcaaggugggcggcaacuacaacuaccuguaccggcuguuccggaagagcaaccugaagcccuucgagcgggacaucagcaccgagaucuaccaagccggcuccaccccuugcaacggcguggagggcuucaacugcuacuucccucugcagagcuacggcuuccagcccaccaacggcgugggcuaccagcccuaccgggugguggugcugagcuucgagcugcugcacgccccagccaccguguguggccccaagaagagcaccaaccuggugaagaacaagugcgugaacuucaacuucaacggccuuaccggcaccggcgugcugaccgagagcaacaagaaauuccugcccuuucagcaguucggccgggacaucgccgacaccaccgacgcugugcgggauccccagacccuggagauccuggacaucaccccuugcagcuucggcggcgugagcgugaucaccccaggcaccaacaccagcaaccagguggccgugcuguaccaggacgugaacugcaccgaggugcccguggccauccacgccgaccagcugacacccaccuggcgggucuacagcaccggcagcaacguguuccagacccgggccgguugccugaucggcgccgagcacgugaacaacagcuacgagugcgacauccccaucggcgccggcaucugugccagcuaccagacccagaccgugucacugaggagcguggccagccagagcaucaucgccuacaccaugagccugggcgccgagaacagcguggccuacagcaacaacagcaucgccauccccaccaacuucaccaucagcgugaccaccgagauucugcccgugagcaugaccaagaccagcguggacugcaccauguacaucugcggcgacagcaccgagugcagcaaccugcugcugcaguacggcagcuucugcacccagcugaaccgggcccugaccggcaucgccguggagcaggacaagaacacccaggagguguucgcccaggugaagcagaucuacaagaccccucccaucaaggacuucggcggcuucaacuucagccagauccugcccgaccccagcaagcccagcaagcggagcuucaucgaggaccugcuguucaacaaggugacccuagccgacgccggcuucaucaagcaguacggcgacugccucggcgacauagccgcccgggaccugaucugcgcccagaaguucaacggccugaccgugcugccuccccugcugaccgacgagaugaucgcccaguacaccagcgcccuguuagccggaaccaucaccagcggcuggacuuucggcgcuggagccgcucugcagauccccuucgccaugcagauggccuaccgguucaacggcaucggcgugacccagaacgugcuguacgagaaccagaagcugaucgccaaccaguucaacagcgccaucggcaagauccaggacagccugagcagcaccgcuagcgcccugggcaagcugcaggacguggugaaccagaacgcccaggcccugaacacccuggugaagcagcugagcagcaacuucggcgccaucagcagcgugcugaacgacauccugagccggcuggacccccccgaggccgaggugcagaucgaccggcugaucacuggccggcugcagagccugcagaccuacgugacccagcagcugauccgggccgccgagauucgggccagcgccaaccuggccgccaccaagaugagcgagugcgugcugggccagagcaagcggguggacuucugcggcaagggcuaccaccugaugagcuuuccccagagcgcaccccacggagugguguuccugcacgugaccuacgugcccgcccaggagaagaacuucaccaccgccccagccaucugccacgacggcaaggcccacuuuccccgggagggcguguucgugagcaacggcacccacugguucgugacccagcggaacuucuacgagccccagaucaucaccaccgacaacaccuucgugagcggcaacugcgacguggugaucggcaucgugaacaacaccguguacgauccccugcagcccgagcuggacagcuucaaggaggagcuggacaaguacuucaagaaucacaccagccccgacguggaccugggcgacaucagcggcaucaacgccagcguggugaacauccagaaggagaucgaucggcugaacgagguggccaagaaccugaacgagagccugaucgaccugcaggagcugggcaaguacgagcaguacaucaaguggcccugguacaucuggcugggcuucaucgccggccugaucgccaucgugauggugaccaucaugcug

SEQ ID NO: 69 - protein, 1231 aa, Artificial Sequence
  Synthetic
MFVFLVLLPLVSSQCVNLTTRTQLPPAYTNSFTRGVYYPDKVFRSSVLHSTQDLFLPFFSNVTWFHAIHVSGTNGTKRFDNPVLPFNDGVYFASTEKSNIIRGWIFGTTLDSKTQSLLIVNNATNVVIKVCEFQFCNDPFLGVYYHKNNKSWMESEFRVYSSANNCTFEYVSQPFLMDLEGKQGNFKNLREFVFKNIDGYFKIYSKHTPINLVRDLPQGFSALEPLVDLPIGINITRFQTLLALHRSYLTPGDSSSGWTAGAAAYYVGYLQPRTFLLKYNENGTITDAVDCALDPLSETKCTLKSFTVEKGIYQTSNFRVQPTESIVRFPNITNLCPFGEVFNATRFASVYAWNRKRISNCVADYSVLYNSASFSTFKCYGVSPTKLNDLCFTNVYADSFVIRGDEVRQIAPGQTGKIADYNYKLPDDFTGCVIAWNSNNLDSKVGGNYNYLYRLFRKSNLKPFERDISTEIYQAGSTPCNGVEGFNCYFPLQSYGFQPTNGVGYQPYRVVVLSFELLHAPATVCGPKKSTNLVKNKCVNFNFNGLTGTGVLTESNKKFLPFQQFGRDIADTTDAVRDPQTLEILDITPCSFGGVSVITPGTNTSNQVAVLYQDVNCTEVPVAIHADQLTPTWRVYSTGSNVFQTRAGCLIGAEHVNNSYECDIPIGAGICASYQTQTVSLRSVASQSIIAYTMSLGAENSVAYSNNSIAIPTNFTISVTTEILPVSMTKTSVDCTMYICGDSTECSNLLLQYGSFCTQLNRALTGIAVEQDKNTQEVFAQVKQIYKTPPIKDFGGFNFSQILPDPSKPSKRSFIEDLLFNKVTLADAGFIKQYGDCLGDIAARDLICAQKFNGLTVLPPLLTDEMIAQYTSALLAGTITSGWTFGAGAALQIPFAMQMAYRFNGIGVTQNVLYENQKLIANQFNSAIGKIQDSLSSTASALGKLQDVVNQNAQALNTLVKQLSSNFGAISSVLNDILSRLDPPEAEVQIDRLITGRLQSLQTYVTQQLIRAAEIRASANLAATKMSECVLGQSKRVDFCGKGYHLMSFPQSAPHGVVFLHVTYVPAQEKNFTTAPAICHDGKAHFPREGVFVSNGTHWFVTQRNFYEPQIITTDNTFVSGNCDVVIGIVNNTVYDPLQPELDSFKEELDKYFKNHTSPDVDLGDISGINASVVNIQKEIDRLNEVAKNLNESLIDLQELGKYEQYIKWPWYIWLGFIAGLIAIVMVTIML

SEQ ID NO: 70 - RNA, 3870 nt, Artificial Sequence
  Synthetic
auguucguguuccuggugcugcugccccuggugagcagccagugcgugaaccugaccacccggacccagcugccaccagccuacaccaacagcuucacccggggcgucuacuaccccgacaagguguuccggagcagcguccugcacagcacccaggaccuguuccugcccuucuucagcaacgugaccugguuccacgccauccacgugagcggcaccaacggcaccaagcgguucgacaaccccgugcugcccuucaacgacggcguguacuucgccagcaccgagaagagcaacaucauccggggcuggaucuucggcaccacccuggacagcaagacccagagccugcugaucgugaauaacgccaccaacguggugaucaaggugugcgaguuccaguucugcaacgaccccuuccugggcguguacuaccacaagaacaacaagagcuggauggagagcgaguuccggguguacagcagcgccaacaacugcaccuucgaguacgugagccagcccuuccugauggaccuggagggcaagcagggcaacuucaagaaccugcgggaguucguguucaagaacaucgacggcuacuucaagaucuacagcaagcacaccccaaucaaccuggugcgggaucugccccagggcuucucagcccuggagccccugguggaccugcccaucggcaucaacaucacccgguuccagacccugcuggcccugcaccggagcuaccugaccccaggcgacagcagcagcggguggacagcaggcgcggcugcuuacuacgugggcuaccugcagccccggaccuuccugcugaaguacaacgagaacggcaccaucaccgacgccguggacugcgcccuggacccucugagcgagaccaagugcacccugaagagcuucaccguggagaagggcaucuaccagaccagcaacuuccgggugcagcccaccgagagcaucgugcgguuccccaacaucaccaaccugugccccuucggcgagguguucaacgccacccgguucgccagcguguacgccuggaaccggaagcggaucagcaacugcguggccgacuacagcgugcuguacaacagcgccagcuucagcaccuucaagugcuacggcgugagccccaccaagcugaacgaccugugcuucaccaacguguacgccgacagcuucgugauccguggcgacgaggugcggcagaucgcacccggccagacaggcaagaucgccgacuacaacuacaagcugcccgacgacuucaccggcugcgugaucgccuggaacagcaacaaccucgacagcaaggugggcggcaacuacaacuaccuguaccggcuguuccggaagagcaaccugaagcccuucgagcgggacaucagcaccgagaucuaccaagccggcuccaccccuugcaacggcguggagggcuucaacugcuacuucccucugcagagcuacggcuuccagcccaccaacggcgugggcuaccagcccuaccgggugguggugcugagcuucgagcugcugcacgccccagccaccguguguggccccaagaagagcaccaaccuggugaagaacaagugcgugaacuucaacuucaacggccuuaccggcaccggcgugcugaccgagagcaacaagaaauuccugcccuuucagcaguucggccgggacaucgccgacaccaccgacgcugugcgggauccccagacccuggagauccuggacaucaccccuugcagcuucggcggcgugagcgugaucaccccaggcaccaacaccagcaaccagguggccgugcuguaccaggacgugaacugcaccgaggugcccguggccauccacgccgaccagcugacacccaccuggcgggucuacagcaccggcagcaacguguuccagacccgggccgguugccugaucggcgccgagcacgugaacaacagcuacgagugcgacauccccaucggcgccggcaucugugccagcuaccagacccagaccgugucacugaggagcguggccagccagagcaucaucgccuacaccaugagccugggcgccgagaacagcguggccuacagcaacaacagcaucgccauccccaccaacuucaccaucagcgugaccaccgagauucugcccgugagcaugaccaagaccagcguggacugcaccauguacaucugcggcgacagcaccgagugcagcaaccugcugcugcaguacggcagcuucugcacccagcugaaccgggcccugaccggcaucgccguggagcaggacaagaacacccaggagguguucgcccaggugaagcagaucuacaagaccccucccaucaaggacuucggcggcuucaacuucagccagauccugcccgaccccagcaagcccagcaagcggagcuucaucgaggaccugcuguucaacaaggugacccuagccgacgccggcuucaucaagcaguacggcgacugccucggcgacauagccgcccgggaccugaucugcgcccagaaguucaacggccugaccgugcugccuccccugcugaccgacgagaugaucgcccaguacaccagcgcccuguuagccggaaccaucaccagcggcuggacuuucggcgcuggagccgcucugcagauccccuucgccaugcagauggccuaccgguucaacggcaucggcgugacccagaacgugcuguacgagaaccagaagcugaucgccaaccaguucaacagcgccaucggcaagauccaggacagccugagcagcaccgcuagcgcccugggcaagcugcaggacguggugaaccagaacgcccaggcccugaacacccuggugaagcagcugagcagcaacuucggcgccaucagcagcgugcugaacgacauccugagccggcuggacccccccgaggccgaggugcagaucgaccggcugaucacuggccggcugcagagccugcagaccuacgugacccagcagcugauccgggccgccgagauucgggccagcgccaaccuggccgccaccaagaugagcgagugcgugcugggccagagcaagcggguggacuucugcggcaagggcuaccaccugaugagcuuuccccagagcgcaccccacggagugguguuccugcacgugaccuacgugcccgcccaggagaagaacuucaccaccgccccagccaucugccacgacggcaaggcccacuuuccccgggagggcguguucgugagcaacggcacccacugguucgugacccagcggaacuucuacgagccccagaucaucaccaccgacaacaccuucgugagcggcaacugcgacguggugaucggcaucgugaacaacaccguguacgauccccugcagcccgagcuggacagcuucaaggaggagcuggacaaguacuucaagaaucacaccagccccgacguggaccugggcgacaucagcggcaucaacgccagcguggugaacauccagaaggagaucgaucggcugaacgagguggccaagaaccugaacgagagccugaucgaccugcaggagcugggcaaguacgagcaguacaucaaguggcccugguacaucuggcugggcuucaucgccggccugaucgccaucgugauggugaccaucaugcugaagaagaagaagcggccacggaacuccuacaagugcggcaccaacaccauggagcgggaggagagcgagcagaccaagaagcgggagaagauccacauuccugaacgguccgacgaagcccagcggguguucaagagcagcaagaccagcagcugcgacaagagcgacaccugcuuc

SEQ ID NO: 71 - protein, 1290 aa, Artificial Sequence
  Synthetic
MFVFLVLLPLVSSQCVNLTTRTQLPPAYTNSFTRGVYYPDKVFRSSVLHSTQDLFLPFFSNVTWFHAIHVSGTNGTKRFDNPVLPFNDGVYFASTEKSNIIRGWIFGTTLDSKTQSLLIVNNATNVVIKVCEFQFCNDPFLGVYYHKNNKSWMESEFRVYSSANNCTFEYVSQPFLMDLEGKQGNFKNLREFVFKNIDGYFKIYSKHTPINLVRDLPQGFSALEPLVDLPIGINITRFQTLLALHRSYLTPGDSSSGWTAGAAAYYVGYLQPRTFLLKYNENGTITDAVDCALDPLSETKCTLKSFTVEKGIYQTSNFRVQPTESIVRFPNITNLCPFGEVFNATRFASVYAWNRKRISNCVADYSVLYNSASFSTFKCYGVSPTKLNDLCFTNVYADSFVIRGDEVRQIAPGQTGKIADYNYKLPDDFTGCVIAWNSNNLDSKVGGNYNYLYRLFRKSNLKPFERDISTEIYQAGSTPCNGVEGFNCYFPLQSYGFQPTNGVGYQPYRVVVLSFELLHAPATVCGPKKSTNLVKNKCVNFNFNGLTGTGVLTESNKKFLPFQQFGRDIADTTDAVRDPQTLEILDITPCSFGGVSVITPGTNTSNQVAVLYQDVNCTEVPVAIHADQLTPTWRVYSTGSNVFQTRAGCLIGAEHVNNSYECDIPIGAGICASYQTQTVSLRSVASQSIIAYTMSLGAENSVAYSNNSIAIPTNFTISVTTEILPVSMTKTSVDCTMYICGDSTECSNLLLQYGSFCTQLNRALTGIAVEQDKNTQEVFAQVKQIYKTPPIKDFGGFNFSQILPDPSKPSKRSFIEDLLFNKVTLADAGFIKQYGDCLGDIAARDLICAQKFNGLTVLPPLLTDEMIAQYTSALLAGTITSGWTFGAGAALQIPFAMQMAYRFNGIGVTQNVLYENQKLIANQFNSAIGKIQDSLSSTASALGKLQDVVNQNAQALNTLVKQLSSNFGAISSVLNDILSRLDPPEAEVQIDRLITGRLQSLQTYVTQQLIRAAEIRASANLAATKMSECVLGQSKRVDFCGKGYHLMSFPQSAPHGVVFLHVTYVPAQEKNFTTAPAICHDGKAHFPREGVFVSNGTHWFVTQRNFYEPQIITTDNTFVSGNCDVVIGIVNNTVYDPLQPELDSFKEELDKYFKNHTSPDVDLGDISGINASVVNIQKEIDRLNEVAKNLNESLIDLQELGKYEQYIKWPWYIWLGFIAGLIAIVMVTIMLKKKKRPRNSYKCGTNTMEREESEQTKKREKIHIPERSDEAQRVFKSSKTSSCDKSDTCF

SEQ ID NO: 72 - RNA, 3750 nt, Artificial Sequence
  Synthetic
auguucguguuccuggugcugcugccccuggugagcagccagugcgugaaccugaccacccggacccagcugccaccagccuacaccaacagcuucacccggggcgucuacuaccccgacaagguguuccggagcagcguccugcacagcacccaggaccuguuccugcccuucuucagcaacgugaccugguuccacgccauccacgugagcggcaccaacggcaccaagcgguucgacaaccccgugcugcccuucaacgacggcguguacuucgccagcaccgagaagagcaacaucauccggggcuggaucuucggcaccacccuggacagcaagacccagagccugcugaucgugaauaacgccaccaacguggugaucaaggugugcgaguuccaguucugcaacgaccccuuccugggcguguacuaccacaagaacaacaagagcuggauggagagcgaguuccggguguacagcagcgccaacaacugcaccuucgaguacgugagccagcccuuccugauggaccuggagggcaagcagggcaacuucaagaaccugcgggaguucguguucaagaacaucgacggcuacuucaagaucuacagcaagcacaccccaaucaaccuggugcgggaucugccccagggcuucucagcccuggagccccugguggaccugcccaucggcaucaacaucacccgguuccagacccugcuggcccugcaccggagcuaccugaccccaggcgacagcagcagcggguggacagcaggcgcggcugcuuacuacgugggcuaccugcagccccggaccuuccugcugaaguacaacgagaacggcaccaucaccgacgccguggacugcgcccuggacccucugagcgagaccaagugcacccugaagagcuucaccguggagaagggcaucuaccagaccagcaacuuccgggugcagcccaccgagagcaucgugcgguuccccaacaucaccaaccugugccccuucggcgagguguucaacgccacccgguucgccagcguguacgccuggaaccggaagcggaucagcaacugcguggccgacuacagcgugcuguacaacagcgccagcuucagcaccuucaagugcuacggcgugagccccaccaagcugaacgaccugugcuucaccaacguguacgccgacagcuucgugauccguggcgacgaggugcggcagaucgcacccggccagacaggcaagaucgccgacuacaacuacaagcugcccgacgacuucaccggcugcgugaucgccuggaacagcaacaaccucgacagcaaggugggcggcaacuacaacuaccuguaccggcuguuccggaagagcaaccugaagcccuucgagcgggacaucagcaccgagaucuaccaagccggcuccaccccuugcaacggcguggagggcuucaacugcuacuucccucugcagagcuacggcuuccagcccaccaacggcgugggcuaccagcccuaccgggugguggugcugagcuucgagcugcugcacgccccagccaccguguguggccccaagaagagcaccaaccuggugaagaacaagugcgugaacuucaacuucaacggccuuaccggcaccggcgugcugaccgagagcaacaagaaauuccugcccuuucagcaguucggccgggacaucgccgacaccaccgacgcugugcgggauccccagacccuggagauccuggacaucaccccuugcagcuucggcggcgugagcgugaucaccccaggcaccaacaccagcaaccagguggccgugcuguaccaggacgugaacugcaccgaggugcccguggccauccacgccgaccagcugacacccaccuggcgggucuacagcaccggcagcaacguguuccagacccgggccgguugccugaucggcgccgagcacgugaacaacagcuacgagugcgacauccccaucggcgccggcaucugugccagcuaccagacccagaccgugucacugaggagcguggccagccagagcaucaucgccuacaccaugagccugggcgccgagaacagcguggccuacagcaacaacagcaucgccauccccaccaacuucaccaucagcgugaccaccgagauucugcccgugagcaugaccaagaccagcguggacugcaccauguacaucugcggcgacagcaccgagugcagcaaccugcugcugcaguacggcagcuucugcacccagcugaaccgggcccugaccggcaucgccguggagcaggacaagaacacccaggagguguucgcccaggugaagcagaucuacaagaccccucccaucaaggacuucggcggcuucaacuucagccagauccugcccgaccccagcaagcccagcaagcggagcuucaucgaggaccugcuguucaacaaggugacccuagccgacgccggcuucaucaagcaguacggcgacugccucggcgacauagccgcccgggaccugaucugcgcccagaaguucaacggccugaccgugcugccuccccugcugaccgacgagaugaucgcccaguacaccagcgcccuguuagccggaaccaucaccagcggcuggacuuucggcgcuggagccgcucugcagauccccuucgccaugcagauggccuaccgguucaacggcaucggcgugacccagaacgugcuguacgagaaccagaagcugaucgccaaccaguucaacagcgccaucggcaagauccaggacagccugagcagcaccgcuagcgcccugggcaagcugcaggacguggugaaccagaacgcccaggcccugaacacccuggugaagcagcugagcagcaacuucggcgccaucagcagcgugcugaacgacauccugagccggcuggacccccccgaggccgaggugcagaucgaccggcugaucacuggccggcugcagagccugcagaccuacgugacccagcagcugauccgggccgccgagauucgggccagcgccaaccuggccgccaccaagaugagcgagugcgugcugggccagagcaagcggguggacuucugcggcaagggcuaccaccugaugagcuuuccccagagcgcaccccacggagugguguuccugcacgugaccuacgugcccgcccaggagaagaacuucaccaccgccccagccaucugccacgacggcaaggcccacuuuccccgggagggcguguucgugagcaacggcacccacugguucgugacccagcggaacuucuacgagccccagaucaucaccaccgacaacaccuucgugagcggcaacugcgacguggugaucggcaucgugaacaacaccguguacgauccccugcagcccgagcuggacagcuucaaggaggagcuggacaaguacuucaagaaucacaccagccccgacguggaccugggcgacaucagcggcaucaacgccagcguggugaacauccagaaggagaucgaucggcugaacgagguggccaagaaccugaacgagagccugaucgaccugcaggagcugggcaaguacgagcaguacaucaaguggcccugguacaucuggcugggcuucaucgccggccugaucgccaucgugauggugaccaucaugcugaagcggcaguacaaggacaugaugagcgagggaggaccaccuggcgcugagccacag

SEQ ID NO: 73 - protein, 1250 aa, Artificial Sequence
  Synthetic
MFVFLVLLPLVSSQCVNLTTRTQLPPAYTNSFTRGVYYPDKVFRSSVLHSTQDLFLPFFSNVTWFHAIHVSGTNGTKRFDNPVLPFNDGVYFASTEKSNIIRGWIFGTTLDSKTQSLLIVNNATNVVIKVCEFQFCNDPFLGVYYHKNNKSWMESEFRVYSSANNCTFEYVSQPFLMDLEGKQGNFKNLREFVFKNIDGYFKIYSKHTPINLVRDLPQGFSALEPLVDLPIGINITRFQTLLALHRSYLTPGDSSSGWTAGAAAYYVGYLQPRTFLLKYNENGTITDAVDCALDPLSETKCTLKSFTVEKGIYQTSNFRVQPTESIVRFPNITNLCPFGEVFNATRFASVYAWNRKRISNCVADYSVLYNSASFSTFKCYGVSPTKLNDLCFTNVYADSFVIRGDEVRQIAPGQTGKIADYNYKLPDDFTGCVIAWNSNNLDSKVGGNYNYLYRLFRKSNLKPFERDISTEIYQAGSTPCNGVEGFNCYFPLQSYGFQPTNGVGYQPYRVVVLSFELLHAPATVCGPKKSTNLVKNKCVNFNFNGLTGTGVLTESNKKFLPFQQFGRDIADTTDAVRDPQTLEILDITPCSFGGVSVITPGTNTSNQVAVLYQDVNCTEVPVAIHADQLTPTWRVYSTGSNVFQTRAGCLIGAEHVNNSYECDIPIGAGICASYQTQTVSLRSVASQSIIAYTMSLGAENSVAYSNNSIAIPTNFTISVTTEILPVSMTKTSVDCTMYICGDSTECSNLLLQYGSFCTQLNRALTGIAVEQDKNTQEVFAQVKQIYKTPPIKDFGGFNFSQILPDPSKPSKRSFIEDLLFNKVTLADAGFIKQYGDCLGDIAARDLICAQKFNGLTVLPPLLTDEMIAQYTSALLAGTITSGWTFGAGAALQIPFAMQMAYRFNGIGVTQNVLYENQKLIANQFNSAIGKIQDSLSSTASALGKLQDVVNQNAQALNTLVKQLSSNFGAISSVLNDILSRLDPPEAEVQIDRLITGRLQSLQTYVTQQLIRAAEIRASANLAATKMSECVLGQSKRVDFCGKGYHLMSFPQSAPHGVVFLHVTYVPAQEKNFTTAPAICHDGKAHFPREGVFVSNGTHWFVTQRNFYEPQIITTDNTFVSGNCDVVIGIVNNTVYDPLQPELDSFKEELDKYFKNHTSPDVDLGDISGINASVVNIQKEIDRLNEVAKNLNESLIDLQELGKYEQYIKWPWYIWLGFIAGLIAIVMVTIMLKRQYKDMMSEGGPPGAEPQ

SEQ ID NO: 74 - RNA, 3795 nt, Artificial Sequence
  Synthetic
auguucguguuccuggugcugcugccccuggugagcagccagugcgugaaccugaccacccggacccagcugccaccagccuacaccaacagcuucacccggggcgucuacuaccccgacaagguguuccggagcagcguccugcacagcacccaggaccuguuccugcccuucuucagcaacgugaccugguuccacgccauccacgugagcggcaccaacggcaccaagcgguucgacaaccccgugcugcccuucaacgacggcguguacuucgccagcaccgagaagagcaacaucauccggggcuggaucuucggcaccacccuggacagcaagacccagagccugcugaucgugaauaacgccaccaacguggugaucaaggugugcgaguuccaguucugcaacgaccccuuccugggcguguacuaccacaagaacaacaagagcuggauggagagcgaguuccggguguacagcagcgccaacaacugcaccuucgaguacgugagccagcccuuccugauggaccuggagggcaagcagggcaacuucaagaaccugcgggaguucguguucaagaacaucgacggcuacuucaagaucuacagcaagcacaccccaaucaaccuggugcgggaucugccccagggcuucucagcccuggagccccugguggaccugcccaucggcaucaacaucacccgguuccagacccugcuggcccugcaccggagcuaccugaccccaggcgacagcagcagcggguggacagcaggcgcggcugcuuacuacgugggcuaccugcagccccggaccuuccugcugaaguacaacgagaacggcaccaucaccgacgccguggacugcgcccuggacccucugagcgagaccaagugcacccugaagagcuucaccguggagaagggcaucuaccagaccagcaacuuccgggugcagcccaccgagagcaucgugcgguuccccaacaucaccaaccugugccccuucggcgagguguucaacgccacccgguucgccagcguguacgccuggaaccggaagcggaucagcaacugcguggccgacuacagcgugcuguacaacagcgccagcuucagcaccuucaagugcuacggcgugagccccaccaagcugaacgaccugugcuucaccaacguguacgccgacagcuucgugauccguggcgacgaggugcggcagaucgcacccggccagacaggcaagaucgccgacuacaacuacaagcugcccgacgacuucaccggcugcgugaucgccuggaacagcaacaaccucgacagcaaggugggcggcaacuacaacuaccuguaccggcuguuccggaagagcaaccugaagcccuucgagcgggacaucagcaccgagaucuaccaagccggcuccaccccuugcaacggcguggagggcuucaacugcuacuucccucugcagagcuacggcuuccagcccaccaacggcgugggcuaccagcccuaccgggugguggugcugagcuucgagcugcugcacgccccagccaccguguguggccccaagaagagcaccaaccuggugaagaacaagugcgugaacuucaacuucaacggccuuaccggcaccggcgugcugaccgagagcaacaagaaauuccugcccuuucagcaguucggccgggacaucgccgacaccaccgacgcugugcgggauccccagacccuggagauccuggacaucaccccuugcagcuucggcggcgugagcgugaucaccccaggcaccaacaccagcaaccagguggccgugcuguaccaggacgugaacugcaccgaggugcccguggccauccacgccgaccagcugacacccaccuggcgggucuacagcaccggcagcaacguguuccagacccgggccgguugccugaucggcgccgagcacgugaacaacagcuacgagugcgacauccccaucggcgccggcaucugugccagcuaccagacccagaccgugucacugaggagcguggccagccagagcaucaucgccuacaccaugagccugggcgccgagaacagcguggccuacagcaacaacagcaucgccauccccaccaacuucaccaucagcgugaccaccgagauucugcccgugagcaugaccaagaccagcguggacugcaccauguacaucugcggcgacagcaccgagugcagcaaccugcugcugcaguacggcagcuucugcacccagcugaaccgggcccugaccggcaucgccguggagcaggacaagaacacccaggagguguucgcccaggugaagcagaucuacaagaccccucccaucaaggacuucggcggcuucaacuucagccagauccugcccgaccccagcaagcccagcaagcggagcuucaucgaggaccugcuguucaacaaggugacccuagccgacgccggcuucaucaagcaguacggcgacugccucggcgacauagccgcccgggaccugaucugcgcccagaaguucaacggccugaccgugcugccuccccugcugaccgacgagaugaucgcccaguacaccagcgcccuguuagccggaaccaucaccagcggcuggacuuucggcgcuggagccgcucugcagauccccuucgccaugcagauggccuaccgguucaacggcaucggcgugacccagaacgugcuguacgagaaccagaagcugaucgccaaccaguucaacagcgccaucggcaagauccaggacagccugagcagcaccgcuagcgcccugggcaagcugcaggacguggugaaccagaacgcccaggcccugaacacccuggugaagcagcugagcagcaacuucggcgccaucagcagcgugcugaacgacauccugagccggcuggacaagguggaggccgaggugcagaucgaccggcugaucacuggccggcugcagagccugcagaccuacgugacccagcagcugauccgggccgccgagauucgggccagcgccaaccuggccgccaccaagaugagcgagugcgugcugggccagagcaagcggguggacuucugcggcaagggcuaccaccugaugagcuuuccccagagcgcaccccacggagugguguuccugcacgugaccuacgugcccgcccaggagaagaacuucaccaccgccccagccaucugccacgacggcaaggcccacuuuccccgggagggcguguucgugagcaacggcacccacugguucgugacccagcggaacuucuacgagccccagaucaucaccaccgacaacaccuucgugagcggcaacugcgacguggugaucggcaucgugaacaacaccguguacgauccccugcagcccgagcuggacagcuucaaggaggagcuggacaaguacuucaagaaucacaccagccccgacguggaccugggcgacaucagcggcaucaacgccagcguggugaacauccagaaggagaucgaucggcugaacgagguggccaagaaccugaacgagagccugaucgaccugcaggagcugggcaaguacgagcaguacaucaaguggcccugguacaucuggcugggcuucaucgccggccugaucgccaucgugauggugaccaucaugcugugcugcaugaccagcugcugcagcugccugaagggcuguugcagcugcggcagcugcugcaaguucgacgaggacgacagcgagcccgugcugaagggcgug

SEQ ID NO: 75 - protein, 1265 aa, Artificial Sequence
  Synthetic
MFVFLVLLPLVSSQCVNLTTRTQLPPAYTNSFTRGVYYPDKVFRSSVLHSTQDLFLPFFSNVTWFHAIHVSGTNGTKRFDNPVLPFNDGVYFASTEKSNIIRGWIFGTTLDSKTQSLLIVNNATNVVIKVCEFQFCNDPFLGVYYHKNNKSWMESEFRVYSSANNCTFEYVSQPFLMDLEGKQGNFKNLREFVFKNIDGYFKIYSKHTPINLVRDLPQGFSALEPLVDLPIGINITRFQTLLALHRSYLTPGDSSSGWTAGAAAYYVGYLQPRTFLLKYNENGTITDAVDCALDPLSETKCTLKSFTVEKGIYQTSNFRVQPTESIVRFPNITNLCPFGEVFNATRFASVYAWNRKRISNCVADYSVLYNSASFSTFKCYGVSPTKLNDLCFTNVYADSFVIRGDEVRQIAPGQTGKIADYNYKLPDDFTGCVIAWNSNNLDSKVGGNYNYLYRLFRKSNLKPFERDISTEIYQAGSTPCNGVEGFNCYFPLQSYGFQPTNGVGYQPYRVVVLSFELLHAPATVCGPKKSTNLVKNKCVNFNFNGLTGTGVLTESNKKFLPFQQFGRDIADTTDAVRDPQTLEILDITPCSFGGVSVITPGTNTSNQVAVLYQDVNCTEVPVAIHADQLTPTWRVYSTGSNVFQTRAGCLIGAEHVNNSYECDIPIGAGICASYQTQTVSLRSVASQSIIAYTMSLGAENSVAYSNNSIAIPTNFTISVTTEILPVSMTKTSVDCTMYICGDSTECSNLLLQYGSFCTQLNRALTGIAVEQDKNTQEVFAQVKQIYKTPPIKDFGGFNFSQILPDPSKPSKRSFIEDLLFNKVTLADAGFIKQYGDCLGDIAARDLICAQKFNGLTVLPPLLTDEMIAQYTSALLAGTITSGWTFGAGAALQIPFAMQMAYRFNGIGVTQNVLYENQKLIANQFNSAIGKIQDSLSSTASALGKLQDVVNQNAQALNTLVKQLSSNFGAISSVLNDILSRLDKVEAEVQIDRLITGRLQSLQTYVTQQLIRAAEIRASANLAATKMSECVLGQSKRVDFCGKGYHLMSFPQSAPHGVVFLHVTYVPAQEKNFTTAPAICHDGKAHFPREGVFVSNGTHWFVTQRNFYEPQIITTDNTFVSGNCDVVIGIVNNTVYDPLQPELDSFKEELDKYFKNHTSPDVDLGDISGINASVVNIQKEIDRLNEVAKNLNESLIDLQELGKYEQYIKWPWYIWLGFIAGLIAIVMVTIMLCCMTSCCSCLKGCCSCGSCCKFDEDDSEPVLKGV

SEQ ID NO: 76 - RNA, 3795 nt, Artificial Sequence
  Synthetic
auguucguguuccuggugcugcugccccuggugagcagccagugcgugaaccugaccacccggacccagcugccaccagccuacaccaacagcuucacccggggcgucuacuaccccgacaagguguuccggagcagcguccugcacagcacccaggaccuguuccugcccuucuucagcaacgugaccugguuccacgccauccacgugagcggcaccaacggcaccaagcgguucgacaaccccgugcugcccuucaacgacggcguguacuucgccagcaccgagaagagcaacaucauccggggcuggaucuucggcaccacccuggacagcaagacccagagccugcugaucgugaauaacgccaccaacguggugaucaaggugugcgaguuccaguucugcaacgaccccuuccugggcguguacuaccacaagaacaacaagagcuggauggagagcgaguuccggguguacagcagcgccaacaacugcaccuucgaguacgugagccagcccuuccugauggaccuggagggcaagcagggcaacuucaagaaccugcgggaguucguguucaagaacaucgacggcuacuucaagaucuacagcaagcacaccccaaucaaccuggugcgggaucugccccagggcuucucagcccuggagccccugguggaccugcccaucggcaucaacaucacccgguuccagacccugcuggcccugcaccggagcuaccugaccccaggcgacagcagcagcggguggacagcaggcgcggcugcuuacuacgugggcuaccugcagccccggaccuuccugcugaaguacaacgagaacggcaccaucaccgacgccguggacugcgcccuggacccucugagcgagaccaagugcacccugaagagcuucaccguggagaagggcaucuaccagaccagcaacuuccgggugcagcccaccgagagcaucgugcgguuccccaacaucaccaaccugugccccuucggcgagguguucaacgccacccgguucgccagcguguacgccuggaaccggaagcggaucagcaacugcguggccgacuacagcgugcuguacaacagcgccagcuucagcaccuucaagugcuacggcgugagccccaccaagcugaacgaccugugcuucaccaacguguacgccgacagcuucgugauccguggcgacgaggugcggcagaucgcacccggccagacaggcaagaucgccgacuacaacuacaagcugcccgacgacuucaccggcugcgugaucgccuggaacagcaacaaccucgacagcaaggugggcggcaacuacaacuaccuguaccggcuguuccggaagagcaaccugaagcccuucgagcgggacaucagcaccgagaucuaccaagccggcuccaccccuugcaacggcguggagggcuucaacugcuacuucccucugcagagcuacggcuuccagcccaccaacggcgugggcuaccagcccuaccgggugguggugcugagcuucgagcugcugcacgccccagccaccguguguggccccaagaagagcaccaaccuggugaagaacaagugcgugaacuucaacuucaacggccuuaccggcaccggcgugcugaccgagagcaacaagaaauuccugcccuuucagcaguucggccgggacaucgccgacaccaccgacgcugugcgggauccccagacccuggagauccuggacaucaccccuugcagcuucggcggcgugagcgugaucaccccaggcaccaacaccagcaaccagguggccgugcuguaccaggacgugaacugcaccgaggugcccguggccauccacgccgaccagcugacacccaccuggcgggucuacagcaccggcagcaacguguuccagacccgggccgguugccugaucggcgccgagcacgugaacaacagcuacgagugcgacauccccaucggcgccggcaucugugccagcuaccagacccagaccgugucacugaggagcguggccagccagagcaucaucgccuacaccaugagccugggcgccgagaacagcguggccuacagcaacaacagcaucgccauccccaccaacuucaccaucagcgugaccaccgagauucugcccgugagcaugaccaagaccagcguggacugcaccauguacaucugcggcgacagcaccgagugcagcaaccugcugcugcaguacggcagcuucugcacccagcugaaccgggcccugaccggcaucgccguggagcaggacaagaacacccaggagguguucgcccaggugaagcagaucuacaagaccccucccaucaaggacuucggcggcuucaacuucagccagauccugcccgaccccagcaagcccagcaagcggagcuucaucgaggaccugcuguucaacaaggugacccuagccgacgccggcuucaucaagcaguacggcgacugccucggcgacauagccgcccgggaccugaucugcgcccagaaguucaacggccugaccgugcugccuccccugcugaccgacgagaugaucgcccaguacaccagcgcccuguuagccggaaccaucaccagcggcuggacuuucggcgcuggagccgcucugcagauccccuucgccaugcagauggccuaccgguucaacggcaucggcgugacccagaacgugcuguacgagaaccagaagcugaucgccaaccaguucaacagcgccaucggcaagauccaggacagccugagcagcaccgcuagcgcccugggcaagcugcaggacguggugaaccagaacgcccaggcccugaacacccuggugaagcagcugagcagcaacuucggcgccaucagcagcgugcugaacgacauccugagccggcuggacccccccgaggccgaggugcagaucgaccggcugaucacuggccggcugcagagccugcagaccuacgugacccagcagcugauccgggccgccgagauucgggccagcgccaaccuggccgccaccaagaugagcgagugcgugcugggccagagcaagcggguggacuucugcggcaagggcuaccaccugaugagcuuuccccagagcgcaccccacggagugguguuccugcacgugaccuacgugcccgcccaggagaagaacuucaccaccgccccagccaucugccacgacggcaaggcccacuuuccccgggagggcguguucgugagcaacggcacccacugguucgugacccagcggaacuucuacgagccccagaucaucaccaccgacaacaccuucgugagcggcaacugcgacguggugaucggcaucgugaacaacaccguguacgauccccugcagcccgagcuggacagcuucaaggaggagcuggacaaguacuucaagaaucacaccagccccgacguggaccugggcgacaucagcggcaucaacgccagcguggugaacauccagaaggagaucgaucggcugaacgagguggccaagaaccugaacgagagccugaucgaccugcaggagcugggcaaguacgagcaguacaucaaguggcccugguacaucuggcugggcuucaucgccggccugaucgccaucgugauggugaccaucaugcugugcugcaugaccagcugcugcagcugccugaagggcuguugcagcugcggcagcugcugcaaguucgacgaggacgacagcgagcccgugcugaagggcgug

SEQ ID NO: 77 - protein, 1265 aa, Artificial Sequence
  Synthetic
MFVFLVLLPLVSSQCVNLTTRTQLPPAYTNSFTRGVYYPDKVFRSSVLHSTQDLFLPFFSNVTWFHAIHVSGTNGTKRFDNPVLPFNDGVYFASTEKSNIIRGWIFGTTLDSKTQSLLIVNNATNVVIKVCEFQFCNDPFLGVYYHKNNKSWMESEFRVYSSANNCTFEYVSQPFLMDLEGKQGNFKNLREFVFKNIDGYFKIYSKHTPINLVRDLPQGFSALEPLVDLPIGINITRFQTLLALHRSYLTPGDSSSGWTAGAAAYYVGYLQPRTFLLKYNENGTITDAVDCALDPLSETKCTLKSFTVEKGIYQTSNFRVQPTESIVRFPNITNLCPFGEVFNATRFASVYAWNRKRISNCVADYSVLYNSASFSTFKCYGVSPTKLNDLCFTNVYADSFVIRGDEVRQIAPGQTGKIADYNYKLPDDFTGCVIAWNSNNLDSKVGGNYNYLYRLFRKSNLKPFERDISTEIYQAGSTPCNGVEGFNCYFPLQSYGFQPTNGVGYQPYRVVVLSFELLHAPATVCGPKKSTNLVKNKCVNFNFNGLTGTGVLTESNKKFLPFQQFGRDIADTTDAVRDPQTLEILDITPCSFGGVSVITPGTNTSNQVAVLYQDVNCTEVPVAIHADQLTPTWRVYSTGSNVFQTRAGCLIGAEHVNNSYECDIPIGAGICASYQTQTVSLRSVASQSIIAYTMSLGAENSVAYSNNSIAIPTNFTISVTTEILPVSMTKTSVDCTMYICGDSTECSNLLLQYGSFCTQLNRALTGIAVEQDKNTQEVFAQVKQIYKTPPIKDFGGFNFSQILPDPSKPSKRSFIEDLLFNKVTLADAGFIKQYGDCLGDIAARDLICAQKFNGLTVLPPLLTDEMIAQYTSALLAGTITSGWTFGAGAALQIPFAMQMAYRFNGIGVTQNVLYENQKLIANQFNSAIGKIQDSLSSTASALGKLQDVVNQNAQALNTLVKQLSSNFGAISSVLNDILSRLDPPEAEVQIDRLITGRLQSLQTYVTQQLIRAAEIRASANLAATKMSECVLGQSKRVDFCGKGYHLMSFPQSAPHGVVFLHVTYVPAQEKNFTTAPAICHDGKAHFPREGVFVSNGTHWFVTQRNFYEPQIITTDNTFVSGNCDVVIGIVNNTVYDPLQPELDSFKEELDKYFKNHTSPDVDLGDISGINASVVNIQKEIDRLNEVAKNLNESLIDLQELGKYEQYIKWPWYIWLGFIAGLIAIVMVTIMLCCMTSCCSCLKGCCSCGSCCKFDEDDSEPVLKGV

SEQ ID NO: 78 - RNA, 3804 nt, Artificial Sequence
  Synthetic
auguucguguuccuggugcugcugccccuggugagcagccagugcgugaaccugaccacccggacccagcugccaccagccuacaccaacagcuucacccggggcgucuacuaccccgacaagguguuccggagcagcguccugcacagcacccaggaccuguuccugcccuucuucagcaacgugaccugguuccacgccauccacgugagcggcaccaacggcaccaagcgguucgacaaccccgugcugcccuucaacgacggcguguacuucgccagcaccgagaagagcaacaucauccggggcuggaucuucggcaccacccuggacagcaagacccagagccugcugaucgugaauaacgccaccaacguggugaucaaggugugcgaguuccaguucugcaacgaccccuuccugggcguguacuaccacaagaacaacaagagcuggauggagagcgaguuccggguguacagcagcgccaacaacugcaccuucgaguacgugagccagcccuuccugauggaccuggagggcaagcagggcaacuucaagaaccugcgggaguucguguucaagaacaucgacggcuacuucaagaucuacagcaagcacaccccaaucaaccuggugcgggaucugccccagggcuucucagcccuggagccccugguggaccugcccaucggcaucaacaucacccgguuccagacccugcuggcccugcaccggagcuaccugaccccaggcgacagcagcagcggguggacagcaggcgcggcugcuuacuacgugggcuaccugcagccccggaccuuccugcugaaguacaacgagaacggcaccaucaccgacgccguggacugcgcccuggacccucugagcgagaccaagugcacccugaagagcuucaccguggagaagggcaucuaccagaccagcaacuuccgggugcagcccaccgagagcaucgugcgguuccccaacaucaccaaccugugccccuucggcgagguguucaacgccacccgguucgccagcguguacgccuggaaccggaagcggaucagcaacugcguggccgacuacagcgugcuguacaacagcgccagcuucagcaccuucaagugcuacggcgugagccccaccaagcugaacgaccugugcuucaccaacguguacgccgacagcuucgugauccguggcgacgaggugcggcagaucgcacccggccagacaggcaagaucgccgacuacaacuacaagcugcccgacgacuucaccggcugcgugaucgccuggaacagcaacaaccucgacagcaaggugggcggcaacuacaacuaccuguaccggcuguuccggaagagcaaccugaagcccuucgagcgggacaucagcaccgagaucuaccaagccggcuccaccccuugcaacggcguggagggcuucaacugcuacuucccucugcagagcuacggcuuccagcccaccaacggcgugggcuaccagcccuaccgggugguggugcugagcuucgagcugcugcacgccccagccaccguguguggccccaagaagagcaccaaccuggugaagaacaagugcgugaacuucaacuucaacggccuuaccggcaccggcgugcugaccgagagcaacaagaaauuccugcccuuucagcaguucggccgggacaucgccgacaccaccgacgcugugcgggauccccagacccuggagauccuggacaucaccccuugcagcuucggcggcgugagcgugaucaccccaggcaccaacaccagcaaccagguggccgugcuguaccaggacgugaacugcaccgaggugcccguggccauccacgccgaccagcugacacccaccuggcgggucuacagcaccggcagcaacguguuccagacccgggccgguugccugaucggcgccgagcacgugaacaacagcuacgagugcgacauccccaucggcgccggcaucugugccagcuaccagacccagaccaauucaccccggagggcaaggagcguggccagccagagcaucaucgccuacaccaugagccugggcgccgagaacagcguggccuacagcaacaacagcaucgccauccccaccaacuucaccaucagcgugaccaccgagauucugcccgugagcaugaccaagaccagcguggacugcaccauguacaucugcggcgacagcaccgagugcagcaaccugcugcugcaguacggcagcuucugcacccagcugaaccgggcccugaccggcaucgccguggagcaggacaagaacacccaggagguguucgcccaggugaagcagaucuacaagaccccucccaucaaggacuucggcggcuucaacuucagccagauccugcccgaccccagcaagcccagcaagcggagcuucaucgaggaccugcuguucaacaaggugacccuagccgacgccggcuucaucaagcaguacggcgacugccucggcgacauagccgcccgggaccugaucugcgcccagaaguucaacggccugaccgugcugccuccccugcugaccgacgagaugaucgcccaguacaccagcgcccuguuagccggaaccaucaccagcggcuggacuuucggcgcuggagccgcucugcagauccccuucgccaugcagauggccuaccgguucaacggcaucggcgugacccagaacgugcuguacgagaaccagaagcugaucgccaaccaguucaacagcgccaucggcaagauccaggacagccugagcagcaccgcuagcgcccugggcaagcugcaggacguggugaaccagaacgcccaggcccugaacacccuggugaagcagcugagcagcaacuucggcgccaucagcagcgugcugaacgacauccugagccggcuggacccucccgaggccgaggugcagaucgaccggcugaucacuggccggcugcagagccugcagaccuacgugacccagcagcugauccgggccgccgagauucgggccagcgccaaccuggccgccaccaagaugagcgagugcgugcugggccagagcaagcggguggacuucugcggcaagggcuaccaccugaugagcuuuccccagagcgcaccccacggagugguguuccugcacgugaccuacgugcccgcccaggagaagaacuucaccaccgccccagccaucugccacgacggcaaggcccacuuuccccgggagggcguguucgugagcaacggcacccacugguucgugacccagcggaacuucuacgagccccagaucaucaccaccgacaacaccuucgugagcggcaacugcgacguggugaucggcaucgugaacaacaccguguacgauccccugcagcccgagcuggacagcuucaaggaggagcuggacaaguacuucaagaaucacaccagccccgacguggaccugggcgacaucagcggcaucaacgccagcguggugaacauccagaaggagaucgaucggcugaacgagguggccaagaaccugaacgagagccugaucgaccugcaggagcugggcaaguacgagcaguacaucaaguggcccugguacaucuggcugggcuucaucgccggccugaucgccaucgugauggugaccaucaugcugugcugcaugaccagcugcugcagcugccugaagggcuguugcagcugcggcagcugcugcaaguucgacgaggacgacagcgagcccgugcugaagggcgug

SEQ ID NO: 79 - protein, 1268 aa, Artificial Sequence
  Synthetic
MFVFLVLLPLVSSQCVNLTTRTQLPPAYTNSFTRGVYYPDKVFRSSVLHSTQDLFLPFFSNVTWFHAIHVSGTNGTKRFDNPVLPFNDGVYFASTEKSNIIRGWIFGTTLDSKTQSLLIVNNATNVVIKVCEFQFCNDPFLGVYYHKNNKSWMESEFRVYSSANNCTFEYVSQPFLMDLEGKQGNFKNLREFVFKNIDGYFKIYSKHTPINLVRDLPQGFSALEPLVDLPIGINITRFQTLLALHRSYLTPGDSSSGWTAGAAAYYVGYLQPRTFLLKYNENGTITDAVDCALDPLSETKCTLKSFTVEKGIYQTSNFRVQPTESIVRFPNITNLCPFGEVFNATRFASVYAWNRKRISNCVADYSVLYNSASFSTFKCYGVSPTKLNDLCFTNVYADSFVIRGDEVRQIAPGQTGKIADYNYKLPDDFTGCVIAWNSNNLDSKVGGNYNYLYRLFRKSNLKPFERDISTEIYQAGSTPCNGVEGFNCYFPLQSYGFQPTNGVGYQPYRVVVLSFELLHAPATVCGPKKSTNLVKNKCVNFNFNGLTGTGVLTESNKKFLPFQQFGRDIADTTDAVRDPQTLEILDITPCSFGGVSVITPGTNTSNQVAVLYQDVNCTEVPVAIHADQLTPTWRVYSTGSNVFQTRAGCLIGAEHVNNSYECDIPIGAGICASYQTQTNSPRRARSVASQSIIAYTMSLGAENSVAYSNNSIAIPTNFTISVTTEILPVSMTKTSVDCTMYICGDSTECSNLLLQYGSFCTQLNRALTGIAVEQDKNTQEVFAQVKQIYKTPPIKDFGGFNFSQILPDPSKPSKRSFIEDLLFNKVTLADAGFIKQYGDCLGDIAARDLICAQKFNGLTVLPPLLTDEMIAQYTSALLAGTITSGWTFGAGAALQIPFAMQMAYRFNGIGVTQNVLYENQKLIANQFNSAIGKIQDSLSSTASALGKLQDVVNQNAQALNTLVKQLSSNFGAISSVLNDILSRLDPPEAEVQIDRLITGRLQSLQTYVTQQLIRAAEIRASANLAATKMSECVLGQSKRVDFCGKGYHLMSFPQSAPHGVVFLHVTYVPAQEKNFTTAPAICHDGKAHFPREGVFVSNGTHWFVTQRNFYEPQIITTDNTFVSGNCDVVIGIVNNTVYDPLQPELDSFKEELDKYFKNHTSPDVDLGDISGINASVVNIQKEIDRLNEVAKNLNESLIDLQELGKYEQYIKWPWYIWLGFIAGLIAIVMVTIMLCCMTSCCSCLKGCCSCGSCCKFDEDDSEPVLKGV

SEQ ID NO: 80 - RNA, 666 nt, Artificial Sequence
  Synthetic
auggccgacagcaacggcaccaucaccguggaggagcugaagaagcugcuggagcaguggaaccuggugaucggcuuccuguuccugaccuggaucugccugcugcaguucgccuacgccaaccggaaccguuuccuguacaucaucaagcugaucuuccuguggcugcuguggcccgugacccuggccugcuucgugcuggccgccguguaccggaucaacuggaucaccggcggcaucgccaucgccauggccugccuggugggccugauguggcugagcuacuucaucgccagcuuccggcuguucgcccggacccggagcauguggagcuucaaccccgagaccaacauccugcugaacgugccccugcacggcacaauccugacccggccccugcuggagagcgagcuugugaucggcgccgugauccugcggggccaccugaggaucgccggccaucaccugggccggugcgacaucaaggaccugcccaaggagaucaccguggccaccagccggacccugagcuacuacaaacugggcgccagccagagaguggccggagacagcggcuucgccgccuacagccgguaccggaucggcaacuacaagcugaacaccgaccacagcagcagcagcgacaacaucgcccugcuggugcag

SEQ ID NO: 81 - protein, 222 aa, Artificial Sequence
  Synthetic
MADSNGTITVEELKKLLEQWNLVIGFLFLTWICLLQFAYANRNRFLYIIKLIFLWLLWPVTLACFVLAAVYRINWITGGIAIAMACLVGLMWLSYFIASFRLFARTRSMWSFNPETNILLNVPLHGTILTRPLLESELVIGAVILRGHLRIAGHHLGRCDIKDLPKEITVATSRTLSYYKLGASQRVAGDSGFAAYSRYRIGNYKLNTDHSSSSDNIALLVQ

SEQ ID NO: 82 - RNA, 225 nt, Artificial Sequence
  Synthetic
auguacagcuucgugagcgaggagaccggcacccugaucgugaacagcgugcugcuguuccuggccuucgugguguuccugcuggugacccuggccauccugaccgcccugcggcugugugccuacugcugcaacaucgugaacgugagccuggugaagcccagcuucuacguguacagccgggugaagaaccugaacagcagccgggugccugaccugcuggug

SEQ ID NO: 83 - protein, 75 aa, Artificial Sequence
  Synthetic
MYSFVSEETGTLIVNSVLLFLAFVVFLLVTLAILTALRLCAYCCNIVNVSLVKPSFYVYSRVKNLNSSRVPDLLV

SEQ ID NO: 84 - RNA, 1257 nt, Artificial Sequence
  Synthetic
augagcgacaacggcccucagaaccagcggaacgcaccccggaucaccuuuggcggccccagcgauagcaccggcagcaaccagaacggcgagagaucaggggcccggagcaagcagcggcguccucagggccugcccaacaacaccgccagcugguucaccgcccugacccagcacggcaaggaggaccugaaguucccucggggccaaggagugcccaucaacaccaacagcagccccgacgaccagaucggcuacuacagaagggccacccggaggauccggggaggggacggcaagaugaaggaccugucuccccggugguacuucuacuaucuuggcacgggcccugaagcuggccugccguacggcgcaaacaaggacggcaucaucugggucgccaccgagggagcccugaacaccccgaaggaccacaucggcacccggaaucccgccaacaacgccgccaucguucugcagcugccccagggcaccacccugcccaagggcuucuacgccgagggcagcagaggcggcucacaggccagcagccggucaagcagccggagccggaacagcagccggaacuccacacccggcucuagccgaggcacaagccccgccagaauggcaggaaacggcggcgacgcugccuuagcccugcuguugcuggaccggcugaaccagcucgagagcaagaugagcggcaagggucagcagcagcaaggccaaaccgugaccaagaagagcgccgccgaggcuagcaagaagccccggcagaagcggaccgccaccaaggccuacaacgugacccaggccuucggucggagaggccccgagcagacccagggcaacuucggcgaccaggagcugauccggcagggcaccgacuacaagcacuggccccagaucgcccaguucgccccuagcgccucagccuucuucggcaugagccggaucggcauggaggugacucccagcggcaccuggcugaccuacaccggcgccaucaagcuggacgacaaggaccccaacuucaaggaccaggugauccugcugaacaagcacaucgacgccuacaagaccuuuccgcccaccgagcccaagaaggacaagaagaagaaggccgacgagacccaggcccugccccaacggcagaagaagcagcagaccgucaccuuacugcccgcagccgaccuggacgacuucagcaagcagcugcagcagagcaugagcagcgccgacagcacccaggcc

SEQ ID NO: 85 - protein, 419 aa, Artificial Sequence
  Synthetic
MSDNGPQNQRNAPRITFGGPSDSTGSNQNGERSGARSKQRRPQGLPNNTASWFTALTQHGKEDLKFPRGQGVPINTNSSPDDQIGYYRRATRRIRGGDGKMKDLSPRWYFYYLGTGPEAGLPYGANKDGIIWVATEGALNTPKDHIGTRNPANNAAIVLQLPQGTTLPKGFYAEGSRGGSQASSRSSSRSRNSSRNSTPGSSRGTSPARMAGNGGDAALALLLLDRLNQLESKMSGKGQQQQGQTVTKKSAAEASKKPRQKRTATKAYNVTQAFGRRGPEQTQGNFGDQELIRQGTDYKHWPQIAQFAPSASAFFGMSRIGMEVTPSGTWLTYTGAIKLDDKDPNFKDQVILLNKHIDAYKTFPPTEPKKDKKKKADETQALPQRQKKQQTVTLLPAADLDDFSKQLQQSMSSADSTQA

SEQ ID NO: 86 - RNA, 3869 nt, Artificial Sequence
  Synthetic
gggaaauaagagagaaaagaagaguaagaagaaauauaagaccccggcgccgccaccauguucguguuccuggugcugcugccccuggugagcagccagugcgugaaccugaccacccggacccagcugccaccagccuacaccaacagcuucacccggggcgucuacuaccccgacaagguguuccggagcagcguccugcacagcacccaggaccuguuccugcccuucuucagcaacgugaccugguuccacgccauccacgugagcggcaccaacggcaccaagcgguucgacaaccccgugcugcccuucaacgacggcguguacuucgccagcaccgagaagagcaacaucauccggggcuggaucuucggcaccacccuggacagcaagacccagagccugcugaucgugaauaacgccaccaacguggugaucaaggugugcgaguuccaguucugcaacgaccccuuccugggcguguacuaccacaagaacaacaagagcuggauggagagcgaguuccggguguacagcagcgccaacaacugcaccuucgaguacgugagccagcccuuccugauggaccuggagggcaagcagggcaacuucaagaaccugcgggaguucguguucaagaacaucgacggcuacuucaagaucuacagcaagcacaccccaaucaaccuggugcgggaucugccccagggcuucucagcccuggagccccugguggaccugcccaucggcaucaacaucacccgguuccagacccugcuggcccugcaccggagcuaccugaccccaggcgacagcagcagcggguggacagcaggcgcggcugcuuacuacgugggcuaccugcagccccggaccuuccugcugaaguacaacgagaacggcaccaucaccgacgccguggacugcgcccuggacccucugagcgagaccaagugcacccugaagagcuucaccguggagaagggcaucuaccagaccagcaacuuccgggugcagcccaccgagagcaucgugcgguuccccaacaucaccaaccugugccccuucggcgagguguucaacgccacccgguucgccagcguguacgccuggaaccggaagcggaucagcaacugcguggccgacuacagcgugcuguacaacagcgccagcuucagcaccuucaagugcuacggcgugagccccaccaagcugaacgaccugugcuucaccaacguguacgccgacagcuucgugauccguggcgacgaggugcggcagaucgcacccggccagacaggcaagaucgccgacuacaacuacaagcugcccgacgacuucaccggcugcgugaucgccuggaacagcaacaaccucgacagcaaggugggcggcaacuacaacuaccuguaccggcuguuccggaagagcaaccugaagcccuucgagcgggacaucagcaccgagaucuaccaagccggcuccaccccuugcaacggcguggagggcuucaacugcuacuucccucugcagagcuacggcuuccagcccaccaacggcgugggcuaccagcccuaccgggugguggugcugagcuucgagcugcugcacgccccagccaccguguguggccccaagaagagcaccaaccuggugaagaacaagugcgugaacuucaacuucaacggccuuaccggcaccggcgugcugaccgagagcaacaagaaauuccugcccuuucagcaguucggccgggacaucgccgacaccaccgacgcugugcgggauccccagacccuggagauccuggacaucaccccuugcagcuucggcggcgugagcgugaucaccccaggcaccaacaccagcaaccagguggccgugcuguaccaggacgugaacugcaccgaggugcccguggccauccacgccgaccagcugacacccaccuggcgggucuacagcaccggcagcaacguguuccagacccgggccgguugccugaucggcgccgagcacgugaacaacagcuacgagugcgacauccccaucggcgccggcaucugugccagcuaccagacccagaccgugucacugaggagcguggccagccagagcaucaucgccuacaccaugagccugggcgccgagaacagcguggccuacagcaacaacagcaucgccauccccaccaacuucaccaucagcgugaccaccgagauucugcccgugagcaugaccaagaccagcguggacugcaccauguacaucugcggcgacagcaccgagugcagcaaccugcugcugcaguacggcagcuucugcacccagcugaaccgggcccugaccggcaucgccguggagcaggacaagaacacccaggagguguucgcccaggugaagcagaucuacaagaccccucccaucaaggacuucggcggcuucaacuucagccagauccugcccgaccccagcaagcccagcaagcggagcuucaucgaggaccugcuguucaacaaggugacccuagccgacgccggcuucaucaagcaguacggcgacugccucggcgacauagccgcccgggaccugaucugcgcccagaaguucaacggccugaccgugcugccuccccugcugaccgacgagaugaucgcccaguacaccagcgcccuguuagccggaaccaucaccagcggcuggacuuucggcgcuggagccgcucugcagauccccuucgccaugcagauggccuaccgguucaacggcaucggcgugacccagaacgugcuguacgagaaccagaagcugaucgccaaccaguucaacagcgccaucggcaagauccaggacagccugagcagcaccgcuagcgcccugggcaagcugcaggacguggugaaccagaacgcccaggcccugaacacccuggugaagcagcugagcagcaacuucggcgccaucagcagcgugcugaacgacauccugagccggcuggacaagguggaggccgaggugcagaucgaccggcugaucacuggccggcugcagagccugcagaccuacgugacccagcagcugauccgggccgccgagauucgggccagcgccaaccuggccgccaccaagaugagcgagugcgugcugggccagagcaagcggguggacuucugcggcaagggcuaccaccugaugagcuuuccccagagcgcaccccacggagugguguuccugcacgugaccuacgugcccgcccaggagaagaacuucaccaccgccccagccaucugccacgacggcaaggcccacuuuccccgggagggcguguucgugagcaacggcacccacugguucgugacccagcggaacuucuacgagccccagaucaucaccaccgacaacaccuucgugagcggcaacugcgacguggugaucggcaucgugaacaacaccguguacgauccccugcagcccgagcuggacagcuucaaggaggagcuggacaaguacuucaagaaucacaccagccccgacguggaccugggcgacaucagcggcaucaacgccagcguggugaacauccagaaggagaucgaucggcugaacgagguggccaagaaccugaacgagagccugaucgaccugcaggagcugggcaaguacgagcaguacaucaaguggcccugguacaucuggcugggcuucaucgccggccugaucgccaucgugauggugaccaucaugcugugauaauaggcuggagccucgguggccuagcuucuugccccuugggccuccccccagccccuccuccccuuccugcacccguacccccguggucuuugaauaaagucugagugggcggc

SEQ ID NO: 87 - RNA, 4046 nt, Artificial Sequence
  Synthetic
gggaaauaagagagaaaagaagaguaagaagaaauauaagaccccggcgccgccaccauguucguguuccuggugcugcugccccuggugagcagccagugcgugaaccugaccacccggacccagcugccaccagccuacaccaacagcuucacccggggcgucuacuaccccgacaagguguuccggagcagcguccugcacagcacccaggaccuguuccugcccuucuucagcaacgugaccugguuccacgccauccacgugagcggcaccaacggcaccaagcgguucgacaaccccgugcugcccuucaacgacggcguguacuucgccagcaccgagaagagcaacaucauccggggcuggaucuucggcaccacccuggacagcaagacccagagccugcugaucgugaauaacgccaccaacguggugaucaaggugugcgaguuccaguucugcaacgaccccuuccugggcguguacuaccacaagaacaacaagagcuggauggagagcgaguuccggguguacagcagcgccaacaacugcaccuucgaguacgugagccagcccuuccugauggaccuggagggcaagcagggcaacuucaagaaccugcgggaguucguguucaagaacaucgacggcuacuucaagaucuacagcaagcacaccccaaucaaccuggugcgggaucugccccagggcuucucagcccuggagccccugguggaccugcccaucggcaucaacaucacccgguuccagacccugcuggcccugcaccggagcuaccugaccccaggcgacagcagcagcggguggacagcaggcgcggcugcuuacuacgugggcuaccugcagccccggaccuuccugcugaaguacaacgagaacggcaccaucaccgacgccguggacugcgcccuggacccucugagcgagaccaagugcacccugaagagcuucaccguggagaagggcaucuaccagaccagcaacuuccgggugcagcccaccgagagcaucgugcgguuccccaacaucaccaaccugugccccuucggcgagguguucaacgccacccgguucgccagcguguacgccuggaaccggaagcggaucagcaacugcguggccgacuacagcgugcuguacaacagcgccagcuucagcaccuucaagugcuacggcgugagccccaccaagcugaacgaccugugcuucaccaacguguacgccgacagcuucgugauccguggcgacgaggugcggcagaucgcacccggccagacaggcaagaucgccgacuacaacuacaagcugcccgacgacuucaccggcugcgugaucgccuggaacagcaacaaccucgacagcaaggugggcggcaacuacaacuaccuguaccggcuguuccggaagagcaaccugaagcccuucgagcgggacaucagcaccgagaucuaccaagccggcuccaccccuugcaacggcguggagggcuucaacugcuacuucccucugcagagcuacggcuuccagcccaccaacggcgugggcuaccagcccuaccgggugguggugcugagcuucgagcugcugcacgccccagccaccguguguggccccaagaagagcaccaaccuggugaagaacaagugcgugaacuucaacuucaacggccuuaccggcaccggcgugcugaccgagagcaacaagaaauuccugcccuuucagcaguucggccgggacaucgccgacaccaccgacgcugugcgggauccccagacccuggagauccuggacaucaccccuugcagcuucggcggcgugagcgugaucaccccaggcaccaacaccagcaaccagguggccgugcuguaccaggacgugaacugcaccgaggugcccguggccauccacgccgaccagcugacacccaccuggcgggucuacagcaccggcagcaacguguuccagacccgggccgguugccugaucggcgccgagcacgugaacaacagcuacgagugcgacauccccaucggcgccggcaucugugccagcuaccagacccagaccgugucacugaggagcguggccagccagagcaucaucgccuacaccaugagccugggcgccgagaacagcguggccuacagcaacaacagcaucgccauccccaccaacuucaccaucagcgugaccaccgagauucugcccgugagcaugaccaagaccagcguggacugcaccauguacaucugcggcgacagcaccgagugcagcaaccugcugcugcaguacggcagcuucugcacccagcugaaccgggcccugaccggcaucgccguggagcaggacaagaacacccaggagguguucgcccaggugaagcagaucuacaagaccccucccaucaaggacuucggcggcuucaacuucagccagauccugcccgaccccagcaagcccagcaagcggagcuucaucgaggaccugcuguucaacaaggugacccuagccgacgccggcuucaucaagcaguacggcgacugccucggcgacauagccgcccgggaccugaucugcgcccagaaguucaacggccugaccgugcugccuccccugcugaccgacgagaugaucgcccaguacaccagcgcccuguuagccggaaccaucaccagcggcuggacuuucggcgcuggagccgcucugcagauccccuucgccaugcagauggccuaccgguucaacggcaucggcgugacccagaacgugcuguacgagaaccagaagcugaucgccaaccaguucaacagcgccaucggcaagauccaggacagccugagcagcaccgcuagcgcccugggcaagcugcaggacguggugaaccagaacgcccaggcccugaacacccuggugaagcagcugagcagcaacuucggcgccaucagcagcgugcugaacgacauccugagccggcuggacaagguggaggccgaggugcagaucgaccggcugaucacuggccggcugcagagccugcagaccuacgugacccagcagcugauccgggccgccgagauucgggccagcgccaaccuggccgccaccaagaugagcgagugcgugcugggccagagcaagcggguggacuucugcggcaagggcuaccaccugaugagcuuuccccagagcgcaccccacggagugguguuccugcacgugaccuacgugcccgcccaggagaagaacuucaccaccgccccagccaucugccacgacggcaaggcccacuuuccccgggagggcguguucgugagcaacggcacccacugguucgugacccagcggaacuucuacgagccccagaucaucaccaccgacaacaccuucgugagcggcaacugcgacguggugaucggcaucgugaacaacaccguguacgauccccugcagcccgagcuggacagcuucaaggaggagcuggacaaguacuucaagaaucacaccagccccgacguggaccugggcgacaucagcggcaucaacgccagcguggugaacauccagaaggagaucgaucggcugaacgagguggccaagaaccugaacgagagccugaucgaccugcaggagcugggcaaguacgagcaguacaucaaguggcccugguacaucuggcugggcuucaucgccggccugaucgccaucgugauggugaccaucaugcugaagaagaagaagcggccacggaacuccuacaagugcggcaccaacaccauggagcgggaggagagcgagcagaccaagaagcgggagaagauccacauuccugaacgguccgacgaagcccagcggguguucaagagcagcaagaccagcagcugcgacaagagcgacaccugcuucugauaauaggcuggagccucgguggccuagcuucuugccccuugggccuccccccagccccuccuccccuuccugcacccguacccccguggucuuugaauaaagucugagugggcggc

SEQ ID NO: 88 - RNA, 3926 nt, Artificial Sequence
  Synthetic
gggaaauaagagagaaaagaagaguaagaagaaauauaagaccccggcgccgccaccauguucguguuccuggugcugcugccccuggugagcagccagugcgugaaccugaccacccggacccagcugccaccagccuacaccaacagcuucacccggggcgucuacuaccccgacaagguguuccggagcagcguccugcacagcacccaggaccuguuccugcccuucuucagcaacgugaccugguuccacgccauccacgugagcggcaccaacggcaccaagcgguucgacaaccccgugcugcccuucaacgacggcguguacuucgccagcaccgagaagagcaacaucauccggggcuggaucuucggcaccacccuggacagcaagacccagagccugcugaucgugaauaacgccaccaacguggugaucaaggugugcgaguuccaguucugcaacgaccccuuccugggcguguacuaccacaagaacaacaagagcuggauggagagcgaguuccggguguacagcagcgccaacaacugcaccuucgaguacgugagccagcccuuccugauggaccuggagggcaagcagggcaacuucaagaaccugcgggaguucguguucaagaacaucgacggcuacuucaagaucuacagcaagcacaccccaaucaaccuggugcgggaucugccccagggcuucucagcccuggagccccugguggaccugcccaucggcaucaacaucacccgguuccagacccugcuggcccugcaccggagcuaccugaccccaggcgacagcagcagcggguggacagcaggcgcggcugcuuacuacgugggcuaccugcagccccggaccuuccugcugaaguacaacgagaacggcaccaucaccgacgccguggacugcgcccuggacccucugagcgagaccaagugcacccugaagagcuucaccguggagaagggcaucuaccagaccagcaacuuccgggugcagcccaccgagagcaucgugcgguuccccaacaucaccaaccugugccccuucggcgagguguucaacgccacccgguucgccagcguguacgccuggaaccggaagcggaucagcaacugcguggccgacuacagcgugcuguacaacagcgccagcuucagcaccuucaagugcuacggcgugagccccaccaagcugaacgaccugugcuucaccaacguguacgccgacagcuucgugauccguggcgacgaggugcggcagaucgcacccggccagacaggcaagaucgccgacuacaacuacaagcugcccgacgacuucaccggcugcgugaucgccuggaacagcaacaaccucgacagcaaggugggcggcaacuacaacuaccuguaccggcuguuccggaagagcaaccugaagcccuucgagcgggacaucagcaccgagaucuaccaagccggcuccaccccuugcaacggcguggagggcuucaacugcuacuucccucugcagagcuacggcuuccagcccaccaacggcgugggcuaccagcccuaccgggugguggugcugagcuucgagcugcugcacgccccagccaccguguguggccccaagaagagcaccaaccuggugaagaacaagugcgugaacuucaacuucaacggccuuaccggcaccggcgugcugaccgagagcaacaagaaauuccugcccuuucagcaguucggccgggacaucgccgacaccaccgacgcugugcgggauccccagacccuggagauccuggacaucaccccuugcagcuucggcggcgugagcgugaucaccccaggcaccaacaccagcaaccagguggccgugcuguaccaggacgugaacugcaccgaggugcccguggccauccacgccgaccagcugacacccaccuggcgggucuacagcaccggcagcaacguguuccagacccgggccgguugccugaucggcgccgagcacgugaacaacagcuacgagugcgacauccccaucggcgccggcaucugugccagcuaccagacccagaccgugucacugaggagcguggccagccagagcaucaucgccuacaccaugagccugggcgccgagaacagcguggccuacagcaacaacagcaucgccauccccaccaacuucaccaucagcgugaccaccgagauucugcccgugagcaugaccaagaccagcguggacugcaccauguacaucugcggcgacagcaccgagugcagcaaccugcugcugcaguacggcagcuucugcacccagcugaaccgggcccugaccggcaucgccguggagcaggacaagaacacccaggagguguucgcccaggugaagcagaucuacaagaccccucccaucaaggacuucggcggcuucaacuucagccagauccugcccgaccccagcaagcccagcaagcggagcuucaucgaggaccugcuguucaacaaggugacccuagccgacgccggcuucaucaagcaguacggcgacugccucggcgacauagccgcccgggaccugaucugcgcccagaaguucaacggccugaccgugcugccuccccugcugaccgacgagaugaucgcccaguacaccagcgcccuguuagccggaaccaucaccagcggcuggacuuucggcgcuggagccgcucugcagauccccuucgccaugcagauggccuaccgguucaacggcaucggcgugacccagaacgugcuguacgagaaccagaagcugaucgccaaccaguucaacagcgccaucggcaagauccaggacagccugagcagcaccgcuagcgcccugggcaagcugcaggacguggugaaccagaacgcccaggcccugaacacccuggugaagcagcugagcagcaacuucggcgccaucagcagcgugcugaacgacauccugagccggcuggacaagguggaggccgaggugcagaucgaccggcugaucacuggccggcugcagagccugcagaccuacgugacccagcagcugauccgggccgccgagauucgggccagcgccaaccuggccgccaccaagaugagcgagugcgugcugggccagagcaagcggguggacuucugcggcaagggcuaccaccugaugagcuuuccccagagcgcaccccacggagugguguuccugcacgugaccuacgugcccgcccaggagaagaacuucaccaccgccccagccaucugccacgacggcaaggcccacuuuccccgggagggcguguucgugagcaacggcacccacugguucgugacccagcggaacuucuacgagccccagaucaucaccaccgacaacaccuucgugagcggcaacugcgacguggugaucggcaucgugaacaacaccguguacgauccccugcagcccgagcuggacagcuucaaggaggagcuggacaaguacuucaagaaucacaccagccccgacguggaccugggcgacaucagcggcaucaacgccagcguggugaacauccagaaggagaucgaucggcugaacgagguggccaagaaccugaacgagagccugaucgaccugcaggagcugggcaaguacgagcaguacaucaaguggcccugguacaucuggcugggcuucaucgccggccugaucgccaucgugauggugaccaucaugcugaagcggcaguacaaggacaugaugagcgagggaggaccaccuggcgcugagccacagugauaauaggcuggagccucgguggccuagcuucuugccccuugggccuccccccagccccuccuccccuuccugcacccguacccccguggucuuugaauaaagucugagugggcggc

SEQ ID NO: 89 - RNA, 3869 nt, Artificial Sequence
  Synthetic
gggaaauaagagagaaaagaagaguaagaagaaauauaagaccccggcgccgccaccauguucguguuccuggugcugcugccccuggugagcagccagugcgugaaccugaccacccggacccagcugccaccagccuacaccaacagcuucacccggggcgucuacuaccccgacaagguguuccggagcagcguccugcacagcacccaggaccuguuccugcccuucuucagcaacgugaccugguuccacgccauccacgugagcggcaccaacggcaccaagcgguucgacaaccccgugcugcccuucaacgacggcguguacuucgccagcaccgagaagagcaacaucauccggggcuggaucuucggcaccacccuggacagcaagacccagagccugcugaucgugaauaacgccaccaacguggugaucaaggugugcgaguuccaguucugcaacgaccccuuccugggcguguacuaccacaagaacaacaagagcuggauggagagcgaguuccggguguacagcagcgccaacaacugcaccuucgaguacgugagccagcccuuccugauggaccuggagggcaagcagggcaacuucaagaaccugcgggaguucguguucaagaacaucgacggcuacuucaagaucuacagcaagcacaccccaaucaaccuggugcgggaucugccccagggcuucucagcccuggagccccugguggaccugcccaucggcaucaacaucacccgguuccagacccugcuggcccugcaccggagcuaccugaccccaggcgacagcagcagcggguggacagcaggcgcggcugcuuacuacgugggcuaccugcagccccggaccuuccugcugaaguacaacgagaacggcaccaucaccgacgccguggacugcgcccuggacccucugagcgagaccaagugcacccugaagagcuucaccguggagaagggcaucuaccagaccagcaacuuccgggugcagcccaccgagagcaucgugcgguuccccaacaucaccaaccugugccccuucggcgagguguucaacgccacccgguucgccagcguguacgccuggaaccggaagcggaucagcaacugcguggccgacuacagcgugcuguacaacagcgccagcuucagcaccuucaagugcuacggcgugagccccaccaagcugaacgaccugugcuucaccaacguguacgccgacagcuucgugauccguggcgacgaggugcggcagaucgcacccggccagacaggcaagaucgccgacuacaacuacaagcugcccgacgacuucaccggcugcgugaucgccuggaacagcaacaaccucgacagcaaggugggcggcaacuacaacuaccuguaccggcuguuccggaagagcaaccugaagcccuucgagcgggacaucagcaccgagaucuaccaagccggcuccaccccuugcaacggcguggagggcuucaacugcuacuucccucugcagagcuacggcuuccagcccaccaacggcgugggcuaccagcccuaccgggugguggugcugagcuucgagcugcugcacgccccagccaccguguguggccccaagaagagcaccaaccuggugaagaacaagugcgugaacuucaacuucaacggccuuaccggcaccggcgugcugaccgagagcaacaagaaauuccugcccuuucagcaguucggccgggacaucgccgacaccaccgacgcugugcgggauccccagacccuggagauccuggacaucaccccuugcagcuucggcggcgugagcgugaucaccccaggcaccaacaccagcaaccagguggccgugcuguaccaggacgugaacugcaccgaggugcccguggccauccacgccgaccagcugacacccaccuggcgggucuacagcaccggcagcaacguguuccagacccgggccgguugccugaucggcgccgagcacgugaacaacagcuacgagugcgacauccccaucggcgccggcaucugugccagcuaccagacccagaccgugucacugaggagcguggccagccagagcaucaucgccuacaccaugagccugggcgccgagaacagcguggccuacagcaacaacagcaucgccauccccaccaacuucaccaucagcgugaccaccgagauucugcccgugagcaugaccaagaccagcguggacugcaccauguacaucugcggcgacagcaccgagugcagcaaccugcugcugcaguacggcagcuucugcacccagcugaaccgggcccugaccggcaucgccguggagcaggacaagaacacccaggagguguucgcccaggugaagcagaucuacaagaccccucccaucaaggacuucggcggcuucaacuucagccagauccugcccgaccccagcaagcccagcaagcggagcuucaucgaggaccugcuguucaacaaggugacccuagccgacgccggcuucaucaagcaguacggcgacugccucggcgacauagccgcccgggaccugaucugcgcccagaaguucaacggccugaccgugcugccuccccugcugaccgacgagaugaucgcccaguacaccagcgcccuguuagccggaaccaucaccagcggcuggacuuucggcgcuggagccgcucugcagauccccuucgccaugcagauggccuaccgguucaacggcaucggcgugacccagaacgugcuguacgagaaccagaagcugaucgccaaccaguucaacagcgccaucggcaagauccaggacagccugagcagcaccgcuagcgcccugggcaagcugcaggacguggugaaccagaacgcccaggcccugaacacccuggugaagcagcugagcagcaacuucggcgccaucagcagcgugcugaacgacauccugagccggcuggacccccccgaggccgaggugcagaucgaccggcugaucacuggccggcugcagagccugcagaccuacgugacccagcagcugauccgggccgccgagauucgggccagcgccaaccuggccgccaccaagaugagcgagugcgugcugggccagagcaagcggguggacuucugcggcaagggcuaccaccugaugagcuuuccccagagcgcaccccacggagugguguuccugcacgugaccuacgugcccgcccaggagaagaacuucaccaccgccccagccaucugccacgacggcaaggcccacuuuccccgggagggcguguucgugagcaacggcacccacugguucgugacccagcggaacuucuacgagccccagaucaucaccaccgacaacaccuucgugagcggcaacugcgacguggugaucggcaucgugaacaacaccguguacgauccccugcagcccgagcuggacagcuucaaggaggagcuggacaaguacuucaagaaucacaccagccccgacguggaccugggcgacaucagcggcaucaacgccagcguggugaacauccagaaggagaucgaucggcugaacgagguggccaagaaccugaacgagagccugaucgaccugcaggagcugggcaaguacgagcaguacaucaaguggcccugguacaucuggcugggcuucaucgccggccugaucgccaucgugauggugaccaucaugcugugauaauaggcuggagccucgguggccuagcuucuugccccuugggccuccccccagccccuccuccccuuccugcacccguacccccguggucuuugaauaaagucugagugggcggc

SEQ ID NO: 90 - RNA, 4046 nt, Artificial Sequence
  Synthetic
gggaaauaagagagaaaagaagaguaagaagaaauauaagaccccggcgccgccaccauguucguguuccuggugcugcugccccuggugagcagccagugcgugaaccugaccacccggacccagcugccaccagccuacaccaacagcuucacccggggcgucuacuaccccgacaagguguuccggagcagcguccugcacagcacccaggaccuguuccugcccuucuucagcaacgugaccugguuccacgccauccacgugagcggcaccaacggcaccaagcgguucgacaaccccgugcugcccuucaacgacggcguguacuucgccagcaccgagaagagcaacaucauccggggcuggaucuucggcaccacccuggacagcaagacccagagccugcugaucgugaauaacgccaccaacguggugaucaaggugugcgaguuccaguucugcaacgaccccuuccugggcguguacuaccacaagaacaacaagagcuggauggagagcgaguuccggguguacagcagcgccaacaacugcaccuucgaguacgugagccagcccuuccugauggaccuggagggcaagcagggcaacuucaagaaccugcgggaguucguguucaagaacaucgacggcuacuucaagaucuacagcaagcacaccccaaucaaccuggugcgggaucugccccagggcuucucagcccuggagccccugguggaccugcccaucggcaucaacaucacccgguuccagacccugcuggcccugcaccggagcuaccugaccccaggcgacagcagcagcggguggacagcaggcgcggcugcuuacuacgugggcuaccugcagccccggaccuuccugcugaaguacaacgagaacggcaccaucaccgacgccguggacugcgcccuggacccucugagcgagaccaagugcacccugaagagcuucaccguggagaagggcaucuaccagaccagcaacuuccgggugcagcccaccgagagcaucgugcgguuccccaacaucaccaaccugugccccuucggcgagguguucaacgccacccgguucgccagcguguacgccuggaaccggaagcggaucagcaacugcguggccgacuacagcgugcuguacaacagcgccagcuucagcaccuucaagugcuacggcgugagccccaccaagcugaacgaccugugcuucaccaacguguacgccgacagcuucgugauccguggcgacgaggugcggcagaucgcacccggccagacaggcaagaucgccgacuacaacuacaagcugcccgacgacuucaccggcugcgugaucgccuggaacagcaacaaccucgacagcaaggugggcggcaacuacaacuaccuguaccggcuguuccggaagagcaaccugaagcccuucgagcgggacaucagcaccgagaucuaccaagccggcuccaccccuugcaacggcguggagggcuucaacugcuacuucccucugcagagcuacggcuuccagcccaccaacggcgugggcuaccagcccuaccgggugguggugcugagcuucgagcugcugcacgccccagccaccguguguggccccaagaagagcaccaaccuggugaagaacaagugcgugaacuucaacuucaacggccuuaccggcaccggcgugcugaccgagagcaacaagaaauuccugcccuuucagcaguucggccgggacaucgccgacaccaccgacgcugugcgggauccccagacccuggagauccuggacaucaccccuugcagcuucggcggcgugagcgugaucaccccaggcaccaacaccagcaaccagguggccgugcuguaccaggacgugaacugcaccgaggugcccguggccauccacgccgaccagcugacacccaccuggcgggucuacagcaccggcagcaacguguuccagacccgggccgguugccugaucggcgccgagcacgugaacaacagcuacgagugcgacauccccaucggcgccggcaucugugccagcuaccagacccagaccgugucacugaggagcguggccagccagagcaucaucgccuacaccaugagccugggcgccgagaacagcguggccuacagcaacaacagcaucgccauccccaccaacuucaccaucagcgugaccaccgagauucugcccgugagcaugaccaagaccagcguggacugcaccauguacaucugcggcgacagcaccgagugcagcaaccugcugcugcaguacggcagcuucugcacccagcugaaccgggcccugaccggcaucgccguggagcaggacaagaacacccaggagguguucgcccaggugaagcagaucuacaagaccccucccaucaaggacuucggcggcuucaacuucagccagauccugcccgaccccagcaagcccagcaagcggagcuucaucgaggaccugcuguucaacaaggugacccuagccgacgccggcuucaucaagcaguacggcgacugccucggcgacauagccgcccgggaccugaucugcgcccagaaguucaacggccugaccgugcugccuccccugcugaccgacgagaugaucgcccaguacaccagcgcccuguuagccggaaccaucaccagcggcuggacuuucggcgcuggagccgcucugcagauccccuucgccaugcagauggccuaccgguucaacggcaucggcgugacccagaacgugcuguacgagaaccagaagcugaucgccaaccaguucaacagcgccaucggcaagauccaggacagccugagcagcaccgcuagcgcccugggcaagcugcaggacguggugaaccagaacgcccaggcccugaacacccuggugaagcagcugagcagcaacuucggcgccaucagcagcgugcugaacgacauccugagccggcuggacccccccgaggccgaggugcagaucgaccggcugaucacuggccggcugcagagccugcagaccuacgugacccagcagcugauccgggccgccgagauucgggccagcgccaaccuggccgccaccaagaugagcgagugcgugcugggccagagcaagcggguggacuucugcggcaagggcuaccaccugaugagcuuuccccagagcgcaccccacggagugguguuccugcacgugaccuacgugcccgcccaggagaagaacuucaccaccgccccagccaucugccacgacggcaaggcccacuuuccccgggagggcguguucgugagcaacggcacccacugguucgugacccagcggaacuucuacgagccccagaucaucaccaccgacaacaccuucgugagcggcaacugcgacguggugaucggcaucgugaacaacaccguguacgauccccugcagcccgagcuggacagcuucaaggaggagcuggacaaguacuucaagaaucacaccagccccgacguggaccugggcgacaucagcggcaucaacgccagcguggugaacauccagaaggagaucgaucggcugaacgagguggccaagaaccugaacgagagccugaucgaccugcaggagcugggcaaguacgagcaguacaucaaguggcccugguacaucuggcugggcuucaucgccggccugaucgccaucgugauggugaccaucaugcugaagaagaagaagcggccacggaacuccuacaagugcggcaccaacaccauggagcgggaggagagcgagcagaccaagaagcgggagaagauccacauuccugaacgguccgacgaagcccagcggguguucaagagcagcaagaccagcagcugcgacaagagcgacaccugcuucugauaauaggcuggagccucgguggccuagcuucuugccccuugggccuccccccagccccuccuccccuuccugcacccguacccccguggucuuugaauaaagucugagugggcggc

SEQ ID NO: 91 - RNA, 3926 nt, Artificial Sequence
  Synthetic
gggaaauaagagagaaaagaagaguaagaagaaauauaagaccccggcgccgccaccauguucguguuccuggugcugcugccccuggugagcagccagugcgugaaccugaccacccggacccagcugccaccagccuacaccaacagcuucacccggggcgucuacuaccccgacaagguguuccggagcagcguccugcacagcacccaggaccuguuccugcccuucuucagcaacgugaccugguuccacgccauccacgugagcggcaccaacggcaccaagcgguucgacaaccccgugcugcccuucaacgacggcguguacuucgccagcaccgagaagagcaacaucauccggggcuggaucuucggcaccacccuggacagcaagacccagagccugcugaucgugaauaacgccaccaacguggugaucaaggugugcgaguuccaguucugcaacgaccccuuccugggcguguacuaccacaagaacaacaagagcuggauggagagcgaguuccggguguacagcagcgccaacaacugcaccuucgaguacgugagccagcccuuccugauggaccuggagggcaagcagggcaacuucaagaaccugcgggaguucguguucaagaacaucgacggcuacuucaagaucuacagcaagcacaccccaaucaaccuggugcgggaucugccccagggcuucucagcccuggagccccugguggaccugcccaucggcaucaacaucacccgguuccagacccugcuggcccugcaccggagcuaccugaccccaggcgacagcagcagcggguggacagcaggcgcggcugcuuacuacgugggcuaccugcagccccggaccuuccugcugaaguacaacgagaacggcaccaucaccgacgccguggacugcgcccuggacccucugagcgagaccaagugcacccugaagagcuucaccguggagaagggcaucuaccagaccagcaacuuccgggugcagcccaccgagagcaucgugcgguuccccaacaucaccaaccugugccccuucggcgagguguucaacgccacccgguucgccagcguguacgccuggaaccggaagcggaucagcaacugcguggccgacuacagcgugcuguacaacagcgccagcuucagcaccuucaagugcuacggcgugagccccaccaagcugaacgaccugugcuucaccaacguguacgccgacagcuucgugauccguggcgacgaggugcggcagaucgcacccggccagacaggcaagaucgccgacuacaacuacaagcugcccgacgacuucaccggcugcgugaucgccuggaacagcaacaaccucgacagcaaggugggcggcaacuacaacuaccuguaccggcuguuccggaagagcaaccugaagcccuucgagcgggacaucagcaccgagaucuaccaagccggcuccaccccuugcaacggcguggagggcuucaacugcuacuucccucugcagagcuacggcuuccagcccaccaacggcgugggcuaccagcccuaccgggugguggugcugagcuucgagcugcugcacgccccagccaccguguguggccccaagaagagcaccaaccuggugaagaacaagugcgugaacuucaacuucaacggccuuaccggcaccggcgugcugaccgagagcaacaagaaauuccugcccuuucagcaguucggccgggacaucgccgacaccaccgacgcugugcgggauccccagacccuggagauccuggacaucaccccuugcagcuucggcggcgugagcgugaucaccccaggcaccaacaccagcaaccagguggccgugcuguaccaggacgugaacugcaccgaggugcccguggccauccacgccgaccagcugacacccaccuggcgggucuacagcaccggcagcaacguguuccagacccgggccgguugccugaucggcgccgagcacgugaacaacagcuacgagugcgacauccccaucggcgccggcaucugugccagcuaccagacccagaccgugucacugaggagcguggccagccagagcaucaucgccuacaccaugagccugggcgccgagaacagcguggccuacagcaacaacagcaucgccauccccaccaacuucaccaucagcgugaccaccgagauucugcccgugagcaugaccaagaccagcguggacugcaccauguacaucugcggcgacagcaccgagugcagcaaccugcugcugcaguacggcagcuucugcacccagcugaaccgggcccugaccggcaucgccguggagcaggacaagaacacccaggagguguucgcccaggugaagcagaucuacaagaccccucccaucaaggacuucggcggcuucaacuucagccagauccugcccgaccccagcaagcccagcaagcggagcuucaucgaggaccugcuguucaacaaggugacccuagccgacgccggcuucaucaagcaguacggcgacugccucggcgacauagccgcccgggaccugaucugcgcccagaaguucaacggccugaccgugcugccuccccugcugaccgacgagaugaucgcccaguacaccagcgcccuguuagccggaaccaucaccagcggcuggacuuucggcgcuggagccgcucugcagauccccuucgccaugcagauggccuaccgguucaacggcaucggcgugacccagaacgugcuguacgagaaccagaagcugaucgccaaccaguucaacagcgccaucggcaagauccaggacagccugagcagcaccgcuagcgcccugggcaagcugcaggacguggugaaccagaacgcccaggcccugaacacccuggugaagcagcugagcagcaacuucggcgccaucagcagcgugcugaacgacauccugagccggcuggacccccccgaggccgaggugcagaucgaccggcugaucacuggccggcugcagagccugcagaccuacgugacccagcagcugauccgggccgccgagauucgggccagcgccaaccuggccgccaccaagaugagcgagugcgugcugggccagagcaagcggguggacuucugcggcaagggcuaccaccugaugagcuuuccccagagcgcaccccacggagugguguuccugcacgugaccuacgugcccgcccaggagaagaacuucaccaccgccccagccaucugccacgacggcaaggcccacuuuccccgggagggcguguucgugagcaacggcacccacugguucgugacccagcggaacuucuacgagccccagaucaucaccaccgacaacaccuucgugagcggcaacugcgacguggugaucggcaucgugaacaacaccguguacgauccccugcagcccgagcuggacagcuucaaggaggagcuggacaaguacuucaagaaucacaccagccccgacguggaccugggcgacaucagcggcaucaacgccagcguggugaacauccagaaggagaucgaucggcugaacgagguggccaagaaccugaacgagagccugaucgaccugcaggagcugggcaaguacgagcaguacaucaaguggcccugguacaucuggcugggcuucaucgccggccugaucgccaucgugauggugaccaucaugcugaagcggcaguacaaggacaugaugagcgagggaggaccaccuggcgcugagccacagugauaauaggcuggagccucgguggccuagcuucuugccccuugggccuccccccagccccuccuccccuuccugcacccguacccccguggucuuugaauaaagucugagugggcggc

SEQ ID NO: 92 - RNA, 3971 nt, Artificial Sequence
  Synthetic
gggaaauaagagagaaaagaagaguaagaagaaauauaagaccccggcgccgccaccauguucguguuccuggugcugcugccccuggugagcagccagugcgugaaccugaccacccggacccagcugccaccagccuacaccaacagcuucacccggggcgucuacuaccccgacaagguguuccggagcagcguccugcacagcacccaggaccuguuccugcccuucuucagcaacgugaccugguuccacgccauccacgugagcggcaccaacggcaccaagcgguucgacaaccccgugcugcccuucaacgacggcguguacuucgccagcaccgagaagagcaacaucauccggggcuggaucuucggcaccacccuggacagcaagacccagagccugcugaucgugaauaacgccaccaacguggugaucaaggugugcgaguuccaguucugcaacgaccccuuccugggcguguacuaccacaagaacaacaagagcuggauggagagcgaguuccggguguacagcagcgccaacaacugcaccuucgaguacgugagccagcccuuccugauggaccuggagggcaagcagggcaacuucaagaaccugcgggaguucguguucaagaacaucgacggcuacuucaagaucuacagcaagcacaccccaaucaaccuggugcgggaucugccccagggcuucucagcccuggagccccugguggaccugcccaucggcaucaacaucacccgguuccagacccugcuggcccugcaccggagcuaccugaccccaggcgacagcagcagcggguggacagcaggcgcggcugcuuacuacgugggcuaccugcagccccggaccuuccugcugaaguacaacgagaacggcaccaucaccgacgccguggacugcgcccuggacccucugagcgagaccaagugcacccugaagagcuucaccguggagaagggcaucuaccagaccagcaacuuccgggugcagcccaccgagagcaucgugcgguuccccaacaucaccaaccugugccccuucggcgagguguucaacgccacccgguucgccagcguguacgccuggaaccggaagcggaucagcaacugcguggccgacuacagcgugcuguacaacagcgccagcuucagcaccuucaagugcuacggcgugagccccaccaagcugaacgaccugugcuucaccaacguguacgccgacagcuucgugauccguggcgacgaggugcggcagaucgcacccggccagacaggcaagaucgccgacuacaacuacaagcugcccgacgacuucaccggcugcgugaucgccuggaacagcaacaaccucgacagcaaggugggcggcaacuacaacuaccuguaccggcuguuccggaagagcaaccugaagcccuucgagcgggacaucagcaccgagaucuaccaagccggcuccaccccuugcaacggcguggagggcuucaacugcuacuucccucugcagagcuacggcuuccagcccaccaacggcgugggcuaccagcccuaccgggugguggugcugagcuucgagcugcugcacgccccagccaccguguguggccccaagaagagcaccaaccuggugaagaacaagugcgugaacuucaacuucaacggccuuaccggcaccggcgugcugaccgagagcaacaagaaauuccugcccuuucagcaguucggccgggacaucgccgacaccaccgacgcugugcgggauccccagacccuggagauccuggacaucaccccuugcagcuucggcggcgugagcgugaucaccccaggcaccaacaccagcaaccagguggccgugcuguaccaggacgugaacugcaccgaggugcccguggccauccacgccgaccagcugacacccaccuggcgggucuacagcaccggcagcaacguguuccagacccgggccgguugccugaucggcgccgagcacgugaacaacagcuacgagugcgacauccccaucggcgccggcaucugugccagcuaccagacccagaccgugucacugaggagcguggccagccagagcaucaucgccuacaccaugagccugggcgccgagaacagcguggccuacagcaacaacagcaucgccauccccaccaacuucaccaucagcgugaccaccgagauucugcccgugagcaugaccaagaccagcguggacugcaccauguacaucugcggcgacagcaccgagugcagcaaccugcugcugcaguacggcagcuucugcacccagcugaaccgggcccugaccggcaucgccguggagcaggacaagaacacccaggagguguucgcccaggugaagcagaucuacaagaccccucccaucaaggacuucggcggcuucaacuucagccagauccugcccgaccccagcaagcccagcaagcggagcuucaucgaggaccugcuguucaacaaggugacccuagccgacgccggcuucaucaagcaguacggcgacugccucggcgacauagccgcccgggaccugaucugcgcccagaaguucaacggccugaccgugcugccuccccugcugaccgacgagaugaucgcccaguacaccagcgcccuguuagccggaaccaucaccagcggcuggacuuucggcgcuggagccgcucugcagauccccuucgccaugcagauggccuaccgguucaacggcaucggcgugacccagaacgugcuguacgagaaccagaagcugaucgccaaccaguucaacagcgccaucggcaagauccaggacagccugagcagcaccgcuagcgcccugggcaagcugcaggacguggugaaccagaacgcccaggcccugaacacccuggugaagcagcugagcagcaacuucggcgccaucagcagcgugcugaacgacauccugagccggcuggacaagguggaggccgaggugcagaucgaccggcugaucacuggccggcugcagagccugcagaccuacgugacccagcagcugauccgggccgccgagauucgggccagcgccaaccuggccgccaccaagaugagcgagugcgugcugggccagagcaagcggguggacuucugcggcaagggcuaccaccugaugagcuuuccccagagcgcaccccacggagugguguuccugcacgugaccuacgugcccgcccaggagaagaacuucaccaccgccccagccaucugccacgacggcaaggcccacuuuccccgggagggcguguucgugagcaacggcacccacugguucgugacccagcggaacuucuacgagccccagaucaucaccaccgacaacaccuucgugagcggcaacugcgacguggugaucggcaucgugaacaacaccguguacgauccccugcagcccgagcuggacagcuucaaggaggagcuggacaaguacuucaagaaucacaccagccccgacguggaccugggcgacaucagcggcaucaacgccagcguggugaacauccagaaggagaucgaucggcugaacgagguggccaagaaccugaacgagagccugaucgaccugcaggagcugggcaaguacgagcaguacaucaaguggcccugguacaucuggcugggcuucaucgccggccugaucgccaucgugauggugaccaucaugcugugcugcaugaccagcugcugcagcugccugaagggcuguugcagcugcggcagcugcugcaaguucgacgaggacgacagcgagcccgugcugaagggcgugugauaauaggcuggagccucgguggccuagcuucuugccccuugggccuccccccagccccuccuccccuuccugcacccguacccccguggucuuugaauaaagucugagugggcggc

SEQ ID NO: 93 - RNA, 3971 nt, Artificial Sequence
  Synthetic
gggaaauaagagagaaaagaagaguaagaagaaauauaagaccccggcgccgccaccauguucguguuccuggugcugcugccccuggugagcagccagugcgugaaccugaccacccggacccagcugccaccagccuacaccaacagcuucacccggggcgucuacuaccccgacaagguguuccggagcagcguccugcacagcacccaggaccuguuccugcccuucuucagcaacgugaccugguuccacgccauccacgugagcggcaccaacggcaccaagcgguucgacaaccccgugcugcccuucaacgacggcguguacuucgccagcaccgagaagagcaacaucauccggggcuggaucuucggcaccacccuggacagcaagacccagagccugcugaucgugaauaacgccaccaacguggugaucaaggugugcgaguuccaguucugcaacgaccccuuccugggcguguacuaccacaagaacaacaagagcuggauggagagcgaguuccggguguacagcagcgccaacaacugcaccuucgaguacgugagccagcccuuccugauggaccuggagggcaagcagggcaacuucaagaaccugcgggaguucguguucaagaacaucgacggcuacuucaagaucuacagcaagcacaccccaaucaaccuggugcgggaucugccccagggcuucucagcccuggagccccugguggaccugcccaucggcaucaacaucacccgguuccagacccugcuggcccugcaccggagcuaccugaccccaggcgacagcagcagcggguggacagcaggcgcggcugcuuacuacgugggcuaccugcagccccggaccuuccugcugaaguacaacgagaacggcaccaucaccgacgccguggacugcgcccuggacccucugagcgagaccaagugcacccugaagagcuucaccguggagaagggcaucuaccagaccagcaacuuccgggugcagcccaccgagagcaucgugcgguuccccaacaucaccaaccugugccccuucggcgagguguucaacgccacccgguucgccagcguguacgccuggaaccggaagcggaucagcaacugcguggccgacuacagcgugcuguacaacagcgccagcuucagcaccuucaagugcuacggcgugagccccaccaagcugaacgaccugugcuucaccaacguguacgccgacagcuucgugauccguggcgacgaggugcggcagaucgcacccggccagacaggcaagaucgccgacuacaacuacaagcugcccgacgacuucaccggcugcgugaucgccuggaacagcaacaaccucgacagcaaggugggcggcaacuacaacuaccuguaccggcuguuccggaagagcaaccugaagcccuucgagcgggacaucagcaccgagaucuaccaagccggcuccaccccuugcaacggcguggagggcuucaacugcuacuucccucugcagagcuacggcuuccagcccaccaacggcgugggcuaccagcccuaccgggugguggugcugagcuucgagcugcugcacgccccagccaccguguguggccccaagaagagcaccaaccuggugaagaacaagugcgugaacuucaacuucaacggccuuaccggcaccggcgugcugaccgagagcaacaagaaauuccugcccuuucagcaguucggccgggacaucgccgacaccaccgacgcugugcgggauccccagacccuggagauccuggacaucaccccuugcagcuucggcggcgugagcgugaucaccccaggcaccaacaccagcaaccagguggccgugcuguaccaggacgugaacugcaccgaggugcccguggccauccacgccgaccagcugacacccaccuggcgggucuacagcaccggcagcaacguguuccagacccgggccgguugccugaucggcgccgagcacgugaacaacagcuacgagugcgacauccccaucggcgccggcaucugugccagcuaccagacccagaccgugucacugaggagcguggccagccagagcaucaucgccuacaccaugagccugggcgccgagaacagcguggccuacagcaacaacagcaucgccauccccaccaacuucaccaucagcgugaccaccgagauucugcccgugagcaugaccaagaccagcguggacugcaccauguacaucugcggcgacagcaccgagugcagcaaccugcugcugcaguacggcagcuucugcacccagcugaaccgggcccugaccggcaucgccguggagcaggacaagaacacccaggagguguucgcccaggugaagcagaucuacaagaccccucccaucaaggacuucggcggcuucaacuucagccagauccugcccgaccccagcaagcccagcaagcggagcuucaucgaggaccugcuguucaacaaggugacccuagccgacgccggcuucaucaagcaguacggcgacugccucggcgacauagccgcccgggaccugaucugcgcccagaaguucaacggccugaccgugcugccuccccugcugaccgacgagaugaucgcccaguacaccagcgcccuguuagccggaaccaucaccagcggcuggacuuucggcgcuggagccgcucugcagauccccuucgccaugcagauggccuaccgguucaacggcaucggcgugacccagaacgugcuguacgagaaccagaagcugaucgccaaccaguucaacagcgccaucggcaagauccaggacagccugagcagcaccgcuagcgcccugggcaagcugcaggacguggugaaccagaacgcccaggcccugaacacccuggugaagcagcugagcagcaacuucggcgccaucagcagcgugcugaacgacauccugagccggcuggacccccccgaggccgaggugcagaucgaccggcugaucacuggccggcugcagagccugcagaccuacgugacccagcagcugauccgggccgccgagauucgggccagcgccaaccuggccgccaccaagaugagcgagugcgugcugggccagagcaagcggguggacuucugcggcaagggcuaccaccugaugagcuuuccccagagcgcaccccacggagugguguuccugcacgugaccuacgugcccgcccaggagaagaacuucaccaccgccccagccaucugccacgacggcaaggcccacuuuccccgggagggcguguucgugagcaacggcacccacugguucgugacccagcggaacuucuacgagccccagaucaucaccaccgacaacaccuucgugagcggcaacugcgacguggugaucggcaucgugaacaacaccguguacgauccccugcagcccgagcuggacagcuucaaggaggagcuggacaaguacuucaagaaucacaccagccccgacguggaccugggcgacaucagcggcaucaacgccagcguggugaacauccagaaggagaucgaucggcugaacgagguggccaagaaccugaacgagagccugaucgaccugcaggagcugggcaaguacgagcaguacaucaaguggcccugguacaucuggcugggcuucaucgccggccugaucgccaucgugauggugaccaucaugcugugcugcaugaccagcugcugcagcugccugaagggcuguugcagcugcggcagcugcugcaaguucgacgaggacgacagcgagcccgugcugaagggcgugugauaauaggcuggagccucgguggccuagcuucuugccccuugggccuccccccagccccuccuccccuuccugcacccguacccccguggucuuugaauaaagucugagugggcggc

SEQ ID NO: 94 - RNA, 3980 nt, Artificial Sequence
  Synthetic
gggaaauaagagagaaaagaagaguaagaagaaauauaagaccccggcgccgccaccauguucguguuccuggugcugcugccccuggugagcagccagugcgugaaccugaccacccggacccagcugccaccagccuacaccaacagcuucacccggggcgucuacuaccccgacaagguguuccggagcagcguccugcacagcacccaggaccuguuccugcccuucuucagcaacgugaccugguuccacgccauccacgugagcggcaccaacggcaccaagcgguucgacaaccccgugcugcccuucaacgacggcguguacuucgccagcaccgagaagagcaacaucauccggggcuggaucuucggcaccacccuggacagcaagacccagagccugcugaucgugaauaacgccaccaacguggugaucaaggugugcgaguuccaguucugcaacgaccccuuccugggcguguacuaccacaagaacaacaagagcuggauggagagcgaguuccggguguacagcagcgccaacaacugcaccuucgaguacgugagccagcccuuccugauggaccuggagggcaagcagggcaacuucaagaaccugcgggaguucguguucaagaacaucgacggcuacuucaagaucuacagcaagcacaccccaaucaaccuggugcgggaucugccccagggcuucucagcccuggagccccugguggaccugcccaucggcaucaacaucacccgguuccagacccugcuggcccugcaccggagcuaccugaccccaggcgacagcagcagcggguggacagcaggcgcggcugcuuacuacgugggcuaccugcagccccggaccuuccugcugaaguacaacgagaacggcaccaucaccgacgccguggacugcgcccuggacccucugagcgagaccaagugcacccugaagagcuucaccguggagaagggcaucuaccagaccagcaacuuccgggugcagcccaccgagagcaucgugcgguuccccaacaucaccaaccugugccccuucggcgagguguucaacgccacccgguucgccagcguguacgccuggaaccggaagcggaucagcaacugcguggccgacuacagcgugcuguacaacagcgccagcuucagcaccuucaagugcuacggcgugagccccaccaagcugaacgaccugugcuucaccaacguguacgccgacagcuucgugauccguggcgacgaggugcggcagaucgcacccggccagacaggcaagaucgccgacuacaacuacaagcugcccgacgacuucaccggcugcgugaucgccuggaacagcaacaaccucgacagcaaggugggcggcaacuacaacuaccuguaccggcuguuccggaagagcaaccugaagcccuucgagcgggacaucagcaccgagaucuaccaagccggcuccaccccuugcaacggcguggagggcuucaacugcuacuucccucugcagagcuacggcuuccagcccaccaacggcgugggcuaccagcccuaccgggugguggugcugagcuucgagcugcugcacgccccagccaccguguguggccccaagaagagcaccaaccuggugaagaacaagugcgugaacuucaacuucaacggccuuaccggcaccggcgugcugaccgagagcaacaagaaauuccugcccuuucagcaguucggccgggacaucgccgacaccaccgacgcugugcgggauccccagacccuggagauccuggacaucaccccuugcagcuucggcggcgugagcgugaucaccccaggcaccaacaccagcaaccagguggccgugcuguaccaggacgugaacugcaccgaggugcccguggccauccacgccgaccagcugacacccaccuggcgggucuacagcaccggcagcaacguguuccagacccgggccgguugccugaucggcgccgagcacgugaacaacagcuacgagugcgacauccccaucggcgccggcaucugugccagcuaccagacccagaccaauucaccccggagggcaaggagcguggccagccagagcaucaucgccuacaccaugagccugggcgccgagaacagcguggccuacagcaacaacagcaucgccauccccaccaacuucaccaucagcgugaccaccgagauucugcccgugagcaugaccaagaccagcguggacugcaccauguacaucugcggcgacagcaccgagugcagcaaccugcugcugcaguacggcagcuucugcacccagcugaaccgggcccugaccggcaucgccguggagcaggacaagaacacccaggagguguucgcccaggugaagcagaucuacaagaccccucccaucaaggacuucggcggcuucaacuucagccagauccugcccgaccccagcaagcccagcaagcggagcuucaucgaggaccugcuguucaacaaggugacccuagccgacgccggcuucaucaagcaguacggcgacugccucggcgacauagccgcccgggaccugaucugcgcccagaaguucaacggccugaccgugcugccuccccugcugaccgacgagaugaucgcccaguacaccagcgcccuguuagccggaaccaucaccagcggcuggacuuucggcgcuggagccgcucugcagauccccuucgccaugcagauggccuaccgguucaacggcaucggcgugacccagaacgugcuguacgagaaccagaagcugaucgccaaccaguucaacagcgccaucggcaagauccaggacagccugagcagcaccgcuagcgcccugggcaagcugcaggacguggugaaccagaacgcccaggcccugaacacccuggugaagcagcugagcagcaacuucggcgccaucagcagcgugcugaacgacauccugagccggcuggacccucccgaggccgaggugcagaucgaccggcugaucacuggccggcugcagagccugcagaccuacgugacccagcagcugauccgggccgccgagauucgggccagcgccaaccuggccgccaccaagaugagcgagugcgugcugggccagagcaagcggguggacuucugcggcaagggcuaccaccugaugagcuuuccccagagcgcaccccacggagugguguuccugcacgugaccuacgugcccgcccaggagaagaacuucaccaccgccccagccaucugccacgacggcaaggcccacuuuccccgggagggcguguucgugagcaacggcacccacugguucgugacccagcggaacuucuacgagccccagaucaucaccaccgacaacaccuucgugagcggcaacugcgacguggugaucggcaucgugaacaacaccguguacgauccccugcagcccgagcuggacagcuucaaggaggagcuggacaaguacuucaagaaucacaccagccccgacguggaccugggcgacaucagcggcaucaacgccagcguggugaacauccagaaggagaucgaucggcugaacgagguggccaagaaccugaacgagagccugaucgaccugcaggagcugggcaaguacgagcaguacaucaaguggcccugguacaucuggcugggcuucaucgccggccugaucgccaucgugauggugaccaucaugcugugcugcaugaccagcugcugcagcugccugaagggcuguugcagcugcggcagcugcugcaaguucgacgaggacgacagcgagcccgugcugaagggcgugugauaauaggcuggagccucgguggccuagcuucuugccccuugggccuccccccagccccuccuccccuuccugcacccguacccccguggucuuugaauaaagucugagugggcggc

SEQ ID NO: 95 - RNA, 842 nt, Artificial Sequence
  Synthetic
gggaaauaagagagaaaagaagaguaagaagaaauauaagaccccggcgccgccaccauggccgacagcaacggcaccaucaccguggaggagcugaagaagcugcuggagcaguggaaccuggugaucggcuuccuguuccugaccuggaucugccugcugcaguucgccuacgccaaccggaaccguuuccuguacaucaucaagcugaucuuccuguggcugcuguggcccgugacccuggccugcuucgugcuggccgccguguaccggaucaacuggaucaccggcggcaucgccaucgccauggccugccuggugggccugauguggcugagcuacuucaucgccagcuuccggcuguucgcccggacccggagcauguggagcuucaaccccgagaccaacauccugcugaacgugccccugcacggcacaauccugacccggccccugcuggagagcgagcuugugaucggcgccgugauccugcggggccaccugaggaucgccggccaucaccugggccggugcgacaucaaggaccugcccaaggagaucaccguggccaccagccggacccugagcuacuacaaacugggcgccagccagagaguggccggagacagcggcuucgccgccuacagccgguaccggaucggcaacuacaagcugaacaccgaccacagcagcagcagcgacaacaucgcccugcuggugcagugauaauaggcuggagccucgguggccuagcuucuugccccuugggccuccccccagccccuccuccccuuccugcacccguacccccguggucuuugaauaaagucugagugggcggc

SEQ ID NO: 96 - RNA, 401 nt, Artificial Sequence
  Synthetic
gggaaauaagagagaaaagaagaguaagaagaaauauaagaccccggcgccgccaccauguacagcuucgugagcgaggagaccggcacccugaucgugaacagcgugcugcuguuccuggccuucgugguguuccugcuggugacccuggccauccugaccgcccugcggcugugugccuacugcugcaacaucgugaacgugagccuggugaagcccagcuucuacguguacagccgggugaagaaccugaacagcagccgggugccugaccugcuggugugauaauaggcuggagccucgguggccuagcuucuugccccuugggccuccccccagccccuccuccccuuccugcacccguacccccguggucuuugaauaaagucugagugggcggc

SEQ ID NO: 97 - RNA, 1433 nt, Artificial Sequence
  Synthetic
gggaaauaagagagaaaagaagaguaagaagaaauauaagaccccggcgccgccaccaugagcgacaacggcccucagaaccagcggaacgcaccccggaucaccuuuggcggccccagcgauagcaccggcagcaaccagaacggcgagagaucaggggcccggagcaagcagcggcguccucagggccugcccaacaacaccgccagcugguucaccgcccugacccagcacggcaaggaggaccugaaguucccucggggccaaggagugcccaucaacaccaacagcagccccgacgaccagaucggcuacuacagaagggccacccggaggauccggggaggggacggcaagaugaaggaccugucuccccggugguacuucuacuaucuuggcacgggcccugaagcuggccugccguacggcgcaaacaaggacggcaucaucugggucgccaccgagggagcccugaacaccccgaaggaccacaucggcacccggaaucccgccaacaacgccgccaucguucugcagcugccccagggcaccacccugcccaagggcuucuacgccgagggcagcagaggcggcucacaggccagcagccggucaagcagccggagccggaacagcagccggaacuccacacccggcucuagccgaggcacaagccccgccagaauggcaggaaacggcggcgacgcugccuuagcccugcuguugcuggaccggcugaaccagcucgagagcaagaugagcggcaagggucagcagcagcaaggccaaaccgugaccaagaagagcgccgccgaggcuagcaagaagccccggcagaagcggaccgccaccaaggccuacaacgugacccaggccuucggucggagaggccccgagcagacccagggcaacuucggcgaccaggagcugauccggcagggcaccgacuacaagcacuggccccagaucgcccaguucgccccuagcgccucagccuucuucggcaugagccggaucggcauggaggugacucccagcggcaccuggcugaccuacaccggcgccaucaagcuggacgacaaggaccccaacuucaaggaccaggugauccugcugaacaagcacaucgacgccuacaagaccuuuccgcccaccgagcccaagaaggacaagaagaagaaggccgacgagacccaggcccugccccaacggcagaagaagcagcagaccgucaccuuacugcccgcagccgaccuggacgacuucagcaagcagcugcagcagagcaugagcagcgccgacagcacccaggccugauaauaggcuggagccucgguggccuagcuucuugccccuugggccuccccccagccccuccuccccuuccugcacccguacccccguggucuuugaauaaagucugagugggcggc

SEQ ID NO: 98 - protein, 4 aa, Artificial Sequence
  Synthetic
GGGS

SEQ ID NO: 99 - protein, 15 aa, Artificial Sequence
  Synthetic
MFVFLVLLPLVSSQC

SEQ ID NO: 100 - protein, 8 aa, Artificial Sequence
  Synthetic
SPRRARSV

SEQ ID NO: 101 - protein, 8 aa, Artificial Sequence
  Synthetic
SPGSGGSV

SEQ ID NO: 102 - protein, 6 aa, Artificial Sequence
  Synthetic
VSLRSV

SEQ ID NO: 103 - protein, 9 aa, Artificial Sequence
  Synthetic
NSPRRARSV

SEQ ID NO: 104 - protein, 4 aa, Artificial Sequence
  Synthetic
TIML

SEQ ID NO: 105 - RNA, 3995 nt, Artificial Sequence; identical to SEQ ID NO: 27
  Synthetic
  modified_base (7)..(7): 1-methylpseudouridine
  modified_base (25)..(25): 1-methylpseudouridine
  modified_base (35)..(35): 1-methylpseudouridine
  modified_base (37)..(37): 1-methylpseudouridine
  modified_base (59)..(59): 1-methylpseudouridine
  modified_base (61)..(62): 1-methylpseudouridine
  modified_base (65)..(65): 1-methylpseudouridine
  modified_base (67)..(68): 1-methylpseudouridine
  modified_base (71)..(71): 1-methylpseudouridine
  modified_base (74)..(74): 1-methylpseudouridine
  modified_base (77)..(77): 1-methylpseudouridine
  modified_base (80)..(80): 1-methylpseudouridine
  modified_base (86)..(86): 1-methylpseudouridine
  modified_base (89)..(89): 1-methylpseudouridine
  modified_base (100)..(100): 1-methylpseudouridine
  modified_base (104)..(104): 1-methylpseudouridine
  modified_base (110)..(110): 1-methylpseudouridine
  modified_base (128)..(128): 1-methylpseudouridine
  modified_base (139)..(139): 1-methylpseudouridine
  modified_base (151)..(152): 1-methylpseudouridine
  modified_base (164)..(164): 1-methylpseudouridine
  modified_base (166)..(166): 1-methylpseudouridine
  modified_base (169)..(169): 1-methylpseudouridine
  modified_base (182)..(182): 1-methylpseudouridine
  modified_base (184)..(185): 1-methylpseudouridine
  modified_base (197)..(197): 1-methylpseudouridine
  modified_base (200)..(200): 1-methylpseudouridine
  modified_base (218)..(218): 1-methylpseudouridine
  modified_base (220)..(221): 1-methylpseudouridine
  modified_base (224)..(224): 1-methylpseudouridine
  modified_base (229)..(230): 1-methylpseudouridine
  modified_base (232)..(233): 1-methylpseudouridine
  modified_base (242)..(242): 1-methylpseudouridine
  modified_base (247)..(247): 1-methylpseudouridine
  modified_base (250)..(251): 1-methylpseudouridine
  modified_base (260)..(260): 1-methylpseudouridine
  modified_base (266)..(266): 1-methylpseudouridine
  modified_base (292)..(293): 1-methylpseudouridine
  modified_base (305)..(305): 1-methylpseudouridine
  modified_base (308)..(308): 1-methylpseudouridine
  modified_base (313)..(314): 1-methylpseudouridine
  modified_base (326)..(326): 1-methylpseudouridine
  modified_base (328)..(328): 1-methylpseudouridine
  modified_base (331)..(332): 1-methylpseudouridine
  modified_base (356)..(356): 1-methylpseudouridine
  modified_base (359)..(359): 1-methylpseudouridine
  modified_base (367)..(367): 1-methylpseudouridine
  modified_base (371)..(371): 1-methylpseudouridine
  modified_base (373)..(374): 1-methylpseudouridine
  modified_base (386)..(386): 1-methylpseudouridine
  modified_base (407)..(407): 1-methylpseudouridine
  modified_base (410)..(410): 1-methylpseudouridine
  modified_base (413)..(413): 1-methylpseudouridine
  modified_base (416)..(416): 1-methylpseudouridine
  modified_base (420)..(420): 1-methylpseudouridine
  modified_base (434)..(434): 1-methylpseudouridine
  modified_base (437)..(437): 1-methylpseudouridine
  modified_base (440)..(440): 1-methylpseudouridine
  modified_base (446)..(446): 1-methylpseudouridine
  modified_base (448)..(448): 1-methylpseudouridine
  modified_base (454)..(455): 1-methylpseudouridine
  modified_base (460)..(461): 1-methylpseudouridine
  modified_base (463)..(463): 1-methylpseudouridine
  modified_base (475)..(476): 1-methylpseudouridine
  modified_base (479)..(479): 1-methylpseudouridine
  modified_base (485)..(485): 1-methylpseudouridine
  modified_base (487)..(487): 1-methylpseudouridine
  modified_base (490)..(490): 1-methylpseudouridine
  modified_base (511)..(511): 1-methylpseudouridine
  modified_base (515)..(515): 1-methylpseudouridine
  modified_base (526)..(527): 1-methylpseudouridine
  modified_base (533)..(533): 1-methylpseudouridine
  modified_base (535)..(535): 1-methylpseudouridine
  modified_base (553)..(553): 1-methylpseudouridine
  modified_base (559)..(560): 1-methylpseudouridine
  modified_base (565)..(565): 1-methylpseudouridine
  modified_base (569)..(569): 1-methylpseudouridine
  modified_base (580)..(581): 1-methylpseudouridine
  modified_base (584)..(584): 1-methylpseudouridine
  modified_base (587)..(587): 1-methylpseudouridine
  modified_base (593)..(593): 1-methylpseudouridine
  modified_base (613)..(614): 1-methylpseudouridine
  modified_base (623)..(623): 1-methylpseudouridine
  modified_base (631)..(632): 1-methylpseudouridine
  modified_base (635)..(635): 1-methylpseudouridine
  modified_base (637)..(638): 1-methylpseudouridine
  modified_base (647)..(647): 1-methylpseudouridine
  modified_base (655)..(655): 1-methylpseudouridine
  modified_base (658)..(659): 1-methylpseudouridine
  modified_base (665)..(665): 1-methylpseudouridine
  modified_base (667)..(667): 1-methylpseudouridine
  modified_base (686)..(686): 1-methylpseudouridine
  modified_base (692)..(692): 1-methylpseudouridine
  modified_base (695)..(695): 1-methylpseudouridine
  modified_base (702)..(702): 1-methylpseudouridine
  modified_base (704)..(704): 1-methylpseudouridine
  modified_base (715)..(716): 1-methylpseudouridine
  modified_base (718)..(718): 1-methylpseudouridine
  modified_base (725)..(725): 1-methylpseudouridine
  modified_base (734)..(734): 1-methylpseudouridine
  modified_base (737)..(737): 1-methylpseudouridine
  modified_base (743)..(743): 1-methylpseudouridine
  modified_base (749)..(749): 1-methylpseudouridine
  modified_base (755)..(755): 1-methylpseudouridine
  modified_base (761)..(761): 1-methylpseudouridine
  modified_base (769)..(770): 1-methylpseudouridine
  modified_base (779)..(779): 1-methylpseudouridine
  modified_base (782)..(782): 1-methylpseudouridine
  modified_base (788)..(788): 1-methylpseudouridine
  modified_base (799)..(799): 1-methylpseudouridine
  modified_base (803)..(803): 1-methylpseudouridine
  modified_base (829)..(829): 1-methylpseudouridine
  modified_base (846)..(846): 1-methylpseudouridine
  modified_base (849)..(850): 1-methylpseudouridine
  modified_base (853)..(853): 1-methylpseudouridine
  modified_base (857)..(857): 1-methylpseudouridine
  modified_base (862)..(862): 1-methylpseudouridine
  modified_base (866)..(866): 1-methylpseudouridine
  modified_base (880)..(881): 1-methylpseudouridine
  modified_base (884)..(884): 1-methylpseudouridine
  modified_base (887)..(887): 1-methylpseudouridine
  modified_base (892)..(892): 1-methylpseudouridine
  modified_base (911)..(911): 1-methylpseudouridine
  modified_base (923)..(923): 1-methylpseudouridine
  modified_base (928)..(928): 1-methylpseudouridine
  modified_base (935)..(935): 1-methylpseudouridine
  modified_base (942)..(942): 1-methylpseudouridine
  modified_base (944)..(944): 1-methylpseudouridine
  modified_base (958)..(958): 1-methylpseudouridine
  modified_base (965)..(965): 1-methylpseudouridine
  modified_base (973)..(974): 1-methylpseudouridine
  modified_base (980)..(980): 1-methylpseudouridine
  modified_base (992)..(992): 1-methylpseudouridine
  modified_base (994)..(994): 1-methylpseudouridine
  modified_base (1009)..(1010): 1-methylpseudouridine
  modified_base (1016)..(1016): 1-methylpseudouridine
  modified_base (1034)..(1034): 1-methylpseudouridine
  modified_base (1037)..(1037): 1-methylpseudouridine
  modified_base (1042)..(1043): 1-methylpseudouridine
  modified_base (1052)..(1052): 1-methylpseudouridine
  modified_base (1061)..(1061): 1-methylpseudouridine
  modified_base (1063)..(1063): 1-methylpseudouridine
  modified_base (1069)..(1070): 1-methylpseudouridine
  modified_base (1079)..(1079): 1-methylpseudouridine
  modified_base (1081)..(1082): 1-methylpseudouridine
  modified_base (1096)..(1097): 1-methylpseudouridine
  modified_base (1106)..(1106): 1-methylpseudouridine
  modified_base (1108)..(1108): 1-methylpseudouridine
  modified_base (1114)..(1114): 1-methylpseudouridine
  modified_base (1130)..(1130): 1-methylpseudouridine
  modified_base (1138)..(1138): 1-methylpseudouridine
  modified_base (1142)..(1142): 1-methylpseudouridine
  modified_base (1150)..(1150): 1-methylpseudouridine
  modified_base (1157)..(1157): 1-methylpseudouridine
  modified_base (1160)..(1160): 1-methylpseudouridine
  modified_base (1162)..(1162): 1-methylpseudouridine
  modified_base (1177)..(1178): 1-methylpseudouridine
  modified_base (1186)..(1187): 1-methylpseudouridine
  modified_base (1192)..(1192): 1-methylpseudouridine
  modified_base (1195)..(1195): 1-methylpseudouridine
  modified_base (1202)..(1202): 1-methylpseudouridine
  modified_base (1217)..(1217): 1-methylpseudouridine
  modified_base (1226)..(1226): 1-methylpseudouridine
  modified_base (1228)..(1228): 1-methylpseudouridine
  modified_base (1231)..(1232): 1-methylpseudouridine
  modified_base (1241)..(1241): 1-methylpseudouridine
  modified_base (1243)..(1243): 1-methylpseudouridine
  modified_base (1255)..(1256): 1-methylpseudouridine
  modified_base (1259)..(1259): 1-methylpseudouridine
  modified_base (1262)..(1262): 1-methylpseudouridine
  modified_base (1266)..(1266): 1-methylpseudouridine
  modified_base (1277)..(1277): 1-methylpseudouridine
  modified_base (1286)..(1286): 1-methylpseudouridine
  modified_base (1310)..(1310): 1-methylpseudouridine
  modified_base (1318)..(1318): 1-methylpseudouridine
  modified_base (1324)..(1324): 1-methylpseudouridine
  modified_base (1331)..(1331): 1-methylpseudouridine
  modified_base (1342)..(1343): 1-methylpseudouridine
  modified_base (1351)..(1351): 1-methylpseudouridine
  modified_base (1355)..(1355): 1-methylpseudouridine
  modified_base (1358)..(1358): 1-methylpseudouridine
  modified_base (1363)..(1363): 1-methylpseudouridine
  modified_base (1379)..(1379): 1-methylpseudouridine
  modified_base (1391)..(1391): 1-methylpseudouridine
  modified_base (1402)..(1402): 1-methylpseudouridine
  modified_base (1408)..(1408): 1-methylpseudouridine
  modified_base (1412)..(1412): 1-methylpseudouridine
  modified_base (1414)..(1414): 1-methylpseudouridine
  modified_base (1421)..(1421): 1-methylpseudouridine
  modified_base (1423)..(1424): 1-methylpseudouridine
  modified_base (1439)..(1439): 1-methylpseudouridine
  modified_base (1447)..(1448): 1-methylpseudouridine
  modified_base (1460)..(1460): 1-methylpseudouridine
  modified_base (1472)..(1472): 1-methylpseudouridine
  modified_base (1474)..(1474): 1-methylpseudouridine
  modified_base (1486)..(1486): 1-methylpseudouridine
  modified_base (1494)..(1495): 1-methylpseudouridine
  modified_base (1505)..(1505): 1-methylpseudouridine
  modified_base (1513)..(1514): 1-methylpseudouridine
  modified_base (1519)..(1519): 1-methylpseudouridine
  modified_base (1522)..(1522): 1-methylpseudouridine
  modified_base (1525)..(1526): 1-methylpseudouridine
  modified_base (1530)..(1530): 1-methylpseudouridine
  modified_base (1532)..(1532): 1-methylpseudouridine
  modified_base (1540)..(1540): 1-methylpseudouridine
  modified_base (1546)..(1547): 1-methylpseudouridine
  modified_base (1565)..(1565): 1-methylpseudouridine
  modified_base (1570)..(1570): 1-methylpseudouridine
  modified_base (1579)..(1579): 1-methylpseudouridine
  modified_base (1586)..(1586): 1-methylpseudouridine
  modified_base (1589)..(1589): 1-methylpseudouridine
  modified_base (1592)..(1592): 1-methylpseudouridine
  modified_base (1595)..(1595): 1-methylpseudouridine
  modified_base (1600)..(1601): 1-methylpseudouridine
  modified_base (1607)..(1607): 1-methylpseudouridine
  modified_base (1610)..(1610): 1-methylpseudouridine
  modified_base (1628)..(1628): 1-methylpseudouridine
  modified_base (1630)..(1630): 1-methylpseudouridine
  modified_base (1632)..(1632): 1-methylpseudouridine
  modified_base (1655)..(1655): 1-methylpseudouridine
  modified_base (1658)..(1658): 1-methylpseudouridine
  modified_base (1669)..(1669): 1-methylpseudouridine
  modified_base (1673)..(1673): 1-methylpseudouridine
  modified_base (1678)..(1679): 1-methylpseudouridine
  modified_base (1684)..(1685): 1-methylpseudouridine
  modified_base (1694)..(1695): 1-methylpseudouridine
  modified_base (1709)..(1709): 1-methylpseudouridine
  modified_base (1712)..(1712): 1-methylpseudouridine
  modified_base (1732)..(1733): 1-methylpseudouridine
  modified_base (1736)..(1736): 1-methylpseudouridine
  modified_base (1741)..(1743): 1-methylpseudouridine
  modified_base (1750)..(1751): 1-methylpseudouridine
  modified_base (1763)..(1763): 1-methylpseudouridine
  modified_base (1782)..(1782): 1-methylpseudouridine
  modified_base (1784)..(1784): 1-methylpseudouridine
  modified_base (1791)..(1791): 1-methylpseudouridine
  modified_base (1802)..(1802): 1-methylpseudouridine
  modified_base (1808)..(1808): 1-methylpseudouridine
  modified_base (1811)..(1811): 1-methylpseudouridine
  modified_base (1817)..(1817): 1-methylpseudouridine
  modified_base (1824)..(1825): 1-methylpseudouridine
  modified_base (1831)..(1832): 1-methylpseudouridine
  modified_base (1841)..(1841): 1-methylpseudouridine
  modified_base (1847)..(1847): 1-methylpseudouridine
  modified_base (1850)..(1850): 1-methylpseudouridine
  modified_base (1880)..(1880): 1-methylpseudouridine
  modified_base (1886)..(1886): 1-methylpseudouridine
  modified_base (1889)..(1889): 1-methylpseudouridine
  modified_base (1891)..(1891): 1-methylpseudouridine
  modified_base (1901)..(1901): 1-methylpseudouridine
  modified_base (1906)..(1906): 1-methylpseudouridine
  modified_base (1916)..(1916): 1-methylpseudouridine
  modified_base (1922)..(1922): 1-methylpseudouridine
  modified_base (1928)..(1928): 1-methylpseudouridine
  modified_base (1943)..(1943): 1-methylpseudouridine
  modified_base (1954)..(1954): 1-methylpseudouridine
  modified_base (1961)..(1961): 1-methylpseudouridine
  modified_base (1963)..(1963): 1-methylpseudouridine
  modified_base (1982)..(1982): 1-methylpseudouridine
  modified_base (1984)..(1985): 1-methylpseudouridine
  modified_base (2001)..(2002): 1-methylpseudouridine
  modified_base (2006)..(2006): 1-methylpseudouridine
  modified_base (2009)..(2009): 1-methylpseudouridine
  modified_base (2024)..(2024): 1-methylpseudouridine
  modified_base (2035)..(2035): 1-methylpseudouridine
  modified_base (2041)..(2041): 1-methylpseudouridine
  modified_base (2048)..(2048): 1-methylpseudouridine
  modified_base (2054)..(2054): 1-methylpseudouridine
  modified_base (2066)..(2066): 1-methylpseudouridine
  modified_base (2068)..(2068): 1-methylpseudouridine
  modified_base (2070)..(2070): 1-methylpseudouridine
  modified_base (2077)..(2077): 1-methylpseudouridine
  modified_base (2094)..(2095): 1-methylpseudouridine
  modified_base (2117)..(2117): 1-methylpseudouridine
  modified_base (2132)..(2132): 1-methylpseudouridine
  modified_base (2135)..(2135): 1-methylpseudouridine
  modified_base (2140)..(2140): 1-methylpseudouridine
  modified_base (2147)..(2147): 1-methylpseudouridine
  modified_base (2153)..(2153): 1-methylpseudouridine
  modified_base (2171)..(2171): 1-methylpseudouridine
  modified_base (2176)..(2176): 1-methylpseudouridine
  modified_base (2192)..(2192): 1-methylpseudouridine
  modified_base (2198)..(2198): 1-methylpseudouridine
  modified_base (2209)..(2210): 1-methylpseudouridine
  modified_base (2216)..(2216): 1-methylpseudouridine
  modified_base (2222)..(2222): 1-methylpseudouridine
  modified_base (2234)..(2235): 1-methylpseudouridine
  modified_base (2237)..(2237): 1-methylpseudouridine
  modified_base (2243)..(2243): 1-methylpseudouridine
  modified_base (2249)..(2249): 1-methylpseudouridine
  modified_base (2264)..(2264): 1-methylpseudouridine
  modified_base (2269)..(2269): 1-methylpseudouridine
  modified_base (2276)..(2276): 1-methylpseudouridine
  modified_base (2278)..(2278): 1-methylpseudouridine
  modified_base (2282)..(2282): 1-methylpseudouridine
  modified_base (2284)..(2284): 1-methylpseudouridine
  modified_base (2302)..(2302): 1-methylpseudouridine
  modified_base (2312)..(2312): 1-methylpseudouridine
  modified_base (2315)..(2315): 1-methylpseudouridine
  modified_base (2318)..(2318): 1-methylpseudouridine
  modified_base (2323)..(2323): 1-methylpseudouridine
  modified_base (2332)..(2333): 1-methylpseudouridine
  modified_base (2335)..(2335): 1-methylpseudouridine
  modified_base (2345)..(2345): 1-methylpseudouridine
  modified_base (2357)..(2357): 1-methylpseudouridine
  modified_base (2366)..(2366): 1-methylpseudouridine
  modified_base (2372)..(2372): 1-methylpseudouridine
  modified_base (2399)..(2399): 1-methylpseudouridine
  modified_base (2401)..(2402): 1-methylpseudouridine
  modified_base (2411)..(2411): 1-methylpseudouridine
  modified_base (2420)..(2420): 1-methylpseudouridine
  modified_base (2422)..(2422): 1-methylpseudouridine
  modified_base (2433)..(2433): 1-methylpseudouridine
  modified_base (2438)..(2438): 1-methylpseudouridine
  modified_base (2446)..(2447): 1-methylpseudouridine
  modified_base (2455)..(2456): 1-methylpseudouridine
  modified_base (2461)..(2462): 1-methylpseudouridine
  modified_base (2471)..(2471): 1-methylpseudouridine
  modified_base (2474)..(2474): 1-methylpseudouridine
  modified_base (2506)..(2507): 1-methylpseudouridine
  modified_base (2510)..(2510): 1-methylpseudouridine
  modified_base (2519)..(2519): 1-methylpseudouridine
  modified_base (2522)..(2522): 1-methylpseudouridine
  modified_base (2524)..(2525): 1-methylpseudouridine
  modified_base (2534)..(2534): 1-methylpseudouridine
  modified_base (2540)..(2540): 1-methylpseudouridine
  modified_base (2554)..(2555): 1-methylpseudouridine
  modified_base (2558)..(2558): 1-methylpseudouridine
  modified_base (2566)..(2566): 1-methylpseudouridine
  modified_base (2575)..(2575): 1-methylpseudouridine
  modified_base (2579)..(2579): 1-methylpseudouridine
  modified_base (2588)..(2588): 1-methylpseudouridine
  modified_base (2603)..(2603): 1-methylpseudouridine
  modified_base (2606)..(2606): 1-methylpseudouridine
  modified_base (2608)..(2608): 1-methylpseudouridine
  modified_base (2620)..(2621): 1-methylpseudouridine
  modified_base (2630)..(2630): 1-methylpseudouridine
  modified_base (2636)..(2636): 1-methylpseudouridine
  modified_base (2639)..(2639): 1-methylpseudouridine
  modified_base (2643)..(2643): 1-methylpseudouridine
  modified_base (2648)..(2648): 1-methylpseudouridine
  modified_base (2651)..(2651): 1-methylpseudouridine
  modified_base (2663)..(2663): 1-methylpseudouridine
  modified_base (2666)..(2666): 1-methylpseudouridine
  modified_base (2674)..(2674): 1-methylpseudouridine
  modified_base (2687)..(2687): 1-methylpseudouridine
  modified_base (2689)..(2690): 1-methylpseudouridine
  modified_base (2702)..(2702): 1-methylpseudouridine
  modified_base (2713)..(2713): 1-methylpseudouridine
  modified_base (2718)..(2720): 1-methylpseudouridine
  modified_base (2727)..(2727): 1-methylpseudouridine
  modified_base (2736)..(2736): 1-methylpseudouridine
  modified_base (2738)..(2738): 1-methylpseudouridine
  modified_base (2744)..(2744): 1-methylpseudouridine
  modified_base (2749)..(2750): 1-methylpseudouridine
  modified_base (2756)..(2756): 1-methylpseudouridine
  modified_base (2762)..(2762): 1-methylpseudouridine
  modified_base (2767)..(2767): 1-methylpseudouridine
  modified_base (2773)..(2774): 1-methylpseudouridine
  modified_base (2783)..(2783): 1-methylpseudouridine
  modified_base (2789)..(2789): 1-methylpseudouridine
  modified_base (2801)..(2801): 1-methylpseudouridine
  modified_base (2804)..(2804): 1-methylpseudouridine
  modified_base (2806)..(2806): 1-methylpseudouridine
  modified_base (2822)..(2822): 1-methylpseudouridine
  modified_base (2825)..(2825): 1-methylpseudouridine
  modified_base (2836)..(2837): 1-methylpseudouridine
  modified_base (2849)..(2849): 1-methylpseudouridine
  modified_base (2858)..(2858): 1-methylpseudouridine
  modified_base (2870)..(2870): 1-methylpseudouridine
  modified_base (2883)..(2883): 1-methylpseudouridine
  modified_base (2891)..(2891): 1-methylpseudouridine
  modified_base (2900)..(2900): 1-methylpseudouridine
  modified_base (2909)..(2909): 1-methylpseudouridine
  modified_base (2912)..(2912): 1-methylpseudouridine
  modified_base (2933)..(2933): 1-methylpseudouridine
  modified_base (2942)..(2942): 1-methylpseudouridine
  modified_base (2945)..(2945): 1-methylpseudouridine
  modified_base (2954)..(2954): 1-methylpseudouridine
  modified_base (2965)..(2966): 1-methylpseudouridine
  modified_base (2975)..(2975): 1-methylpseudouridine
  modified_base (2984)..(2984): 1-methylpseudouridine
  modified_base (2987)..(2987): 1-methylpseudouridine
  modified_base (2996)..(2996): 1-methylpseudouridine
  modified_base (2999)..(2999): 1-methylpseudouridine
  modified_base (3008)..(3008): 1-methylpseudouridine
  modified_base (3015)..(3015): 1-methylpseudouridine
  modified_base (3029)..(3029): 1-methylpseudouridine
  modified_base (3035)..(3035): 1-methylpseudouridine
  modified_base (3044)..(3044): 1-methylpseudouridine
  modified_base (3047)..(3047): 1-methylpseudouridine
  modified_base (3051)..(3051): 1-methylpseudouridine
  modified_base (3059)..(3059): 1-methylpseudouridine
  modified_base (3068)..(3068): 1-methylpseudouridine
  modified_base (3076)..(3076): 1-methylpseudouridine
  modified_base (3080)..(3080): 1-methylpseudouridine
  modified_base (3092)..(3092): 1-methylpseudouridine
  modified_base (3095)..(3095): 1-methylpseudouridine
  modified_base (3110)..(3111): 1-methylpseudouridine
  modified_base (3128)..(3128): 1-methylpseudouridine
  modified_base (3143)..(3143): 1-methylpseudouridine
  modified_base (3151)..(3151): 1-methylpseudouridine
  modified_base (3155)..(3155): 1-methylpseudouridine
  modified_base (3158)..(3158): 1-methylpseudouridine
  modified_base (3176)..(3176): 1-methylpseudouridine
  modified_base (3181)..(3182): 1-methylpseudouridine
  modified_base (3184)..(3184): 1-methylpseudouridine
  modified_base (3196)..(3196): 1-methylpseudouridine
  modified_base (3203)..(3203): 1-methylpseudouridine
  modified_base (3206)..(3206): 1-methylpseudouridine
  modified_base (3211)..(3213): 1-methylpseudouridine
  modified_base (3236)..(3236): 1-methylpseudouridine
  modified_base (3239)..(3239): 1-methylpseudouridine
  modified_base (3241)..(3242): 1-methylpseudouridine
  modified_base (3245)..(3245): 1-methylpseudouridine
  modified_base (3251)..(3251): 1-methylpseudouridine
  modified_base (3256)..(3256): 1-methylpseudouridine
  modified_base (3260)..(3260): 1-methylpseudouridine
  modified_base (3280)..(3281): 1-methylpseudouridine
  modified_base (3299)..(3299): 1-methylpseudouridine
  modified_base (3301)..(3301): 1-methylpseudouridine
  modified_base (3322)..(3324): 1-methylpseudouridine
  modified_base (3338)..(3338): 1-methylpseudouridine
  modified_base (3340)..(3341): 1-methylpseudouridine
  modified_base (3344)..(3344): 1-methylpseudouridine
  modified_base (3361)..(3361): 1-methylpseudouridine
  modified_base (3364)..(3365): 1-methylpseudouridine
  modified_base (3368)..(3368): 1-methylpseudouridine
  modified_base (3382)..(3383): 1-methylpseudouridine
  modified_base (3385)..(3385): 1-methylpseudouridine
  modified_base (3398)..(3398): 1-methylpseudouridine
  modified_base (3401)..(3401): 1-methylpseudouridine
  modified_base (3418)..(3419): 1-methylpseudouridine
  modified_base (3422)..(3422): 1-methylpseudouridine
  modified_base (3433)..(3433): 1-methylpseudouridine
  modified_base (3440)..(3440): 1-methylpseudouridine
  modified_base (3443)..(3443): 1-methylpseudouridine
  modified_base (3446)..(3446): 1-methylpseudouridine
  modified_base (3452)..(3452): 1-methylpseudouridine
  modified_base (3455)..(3455): 1-methylpseudouridine
  modified_base (3467)..(3467): 1-methylpseudouridine
  modified_base (3469)..(3469): 1-methylpseudouridine
  modified_base (3474)..(3474): 1-methylpseudouridine
  modified_base (3479)..(3479): 1-methylpseudouridine
  modified_base (3491)..(3491): 1-methylpseudouridine
  modified_base (3499)..(3500): 1-methylpseudouridine
  modified_base (3512)..(3512): 1-methylpseudouridine
  modified_base (3520)..(3520): 1-methylpseudouridine
  modified_base (3523)..(3524): 1-methylpseudouridine
  modified_base (3531)..(3531): 1-methylpseudouridine
  modified_base (3548)..(3548): 1-methylpseudouridine
  modified_base (3554)..(3554): 1-methylpseudouridine
  modified_base (3563)..(3563): 1-methylpseudouridine
  modified_base (3572)..(3572): 1-methylpseudouridine
  modified_base (3584)..(3584): 1-methylpseudouridine
  modified_base (3587)..(3587): 1-methylpseudouridine
  modified_base (3593)..(3593): 1-methylpseudouridine
  modified_base (3605)..(3605): 1-methylpseudouridine
  modified_base (3609)..(3609): 1-methylpseudouridine
  modified_base (3614)..(3614): 1-methylpseudouridine
  modified_base (3623)..(3623): 1-methylpseudouridine
  modified_base (3635)..(3635): 1-methylpseudouridine
  modified_base (3647)..(3647): 1-methylpseudouridine
  modified_base (3650)..(3650): 1-methylpseudouridine
  modified_base (3656)..(3656): 1-methylpseudouridine
  modified_base (3665)..(3665): 1-methylpseudouridine
  modified_base (3673)..(3673): 1-methylpseudouridine
  modified_base (3682)..(3682): 1-methylpseudouridine
  modified_base (3686)..(3686): 1-methylpseudouridine
  modified_base (3691)..(3691): 1-methylpseudouridine
  modified_base (3697)..(3697): 1-methylpseudouridine
  modified_base (3700)..(3700): 1-methylpseudouridine
  modified_base (3704)..(3704): 1-methylpseudouridine
  modified_base (3706)..(3706): 1-methylpseudouridine
  modified_base (3710)..(3710): 1-methylpseudouridine
  modified_base (3715)..(3716): 1-methylpseudouridine
  modified_base (3719)..(3719): 1-methylpseudouridine
  modified_base (3728)..(3728): 1-methylpseudouridine
  modified_base (3731)..(3731): 1-methylpseudouridine
  modified_base (3737)..(3737): 1-methylpseudouridine
  modified_base (3740)..(3740): 1-methylpseudouridine
  modified_base (3743)..(3743): 1-methylpseudouridine
  modified_base (3746)..(3746): 1-methylpseudouridine
  modified_base (3752)..(3752): 1-methylpseudouridine
  modified_base (3755)..(3755): 1-methylpseudouridine
  modified_base (3758)..(3758): 1-methylpseudouridine
  modified_base (3760)..(3760): 1-methylpseudouridine
  modified_base (3763)..(3763): 1-methylpseudouridine
  modified_base (3767)..(3767): 1-methylpseudouridine
  modified_base (3775)..(3775): 1-methylpseudouridine
  modified_base (3778)..(3778): 1-methylpseudouridine
  modified_base (3784)..(3784): 1-methylpseudouridine
  modified_base (3788)..(3788): 1-methylpseudouridine
  modified_base (3796)..(3796): 1-methylpseudouridine
  modified_base (3798)..(3799): 1-methylpseudouridine
  modified_base (3805)..(3805): 1-methylpseudouridine
  modified_base (3814)..(3814): 1-methylpseudouridine
  modified_base (3817)..(3817): 1-methylpseudouridine
  modified_base (3823)..(3824): 1-methylpseudouridine
  modified_base (3848)..(3848): 1-methylpseudouridine
  modified_base (3851)..(3851): 1-methylpseudouridine
  modified_base (3860)..(3860): 1-methylpseudouridine
  modified_base (3866)..(3866): 1-methylpseudouridine
  modified_base (3871)..(3871): 1-methylpseudouridine
  modified_base (3877)..(3877): 1-methylpseudouridine
  modified_base (3880)..(3880): 1-methylpseudouridine
  modified_base (3883)..(3883): 1-methylpseudouridine
  modified_base (3888)..(3888): 1-methylpseudouridine
  modified_base (3895)..(3895): 1-methylpseudouridine
  modified_base (3899)..(3899): 1-methylpseudouridine
  modified_base (3904)..(3904): 1-methylpseudouridine
  modified_base (3908)..(3909): 1-methylpseudouridine
  modified_base (3911)..(3912): 1-methylpseudouridine
  modified_base (3918)..(3919): 1-methylpseudouridine
  modified_base (3925)..(3925): 1-methylpseudouridine
  modified_base (3938)..(3938): 1-methylpseudouridine
  modified_base (3941)..(3941): 1-methylpseudouridine
  modified_base (3946)..(3947): 1-methylpseudouridine
  modified_base (3950)..(3950): 1-methylpseudouridine
  modified_base (3958)..(3958): 1-methylpseudouridine
  modified_base (3966)..(3966): 1-methylpseudouridine
  modified_base (3969)..(3969): 1-methylpseudouridine
  modified_base (3971)..(3973): 1-methylpseudouridine
  modified_base (3977)..(3977): 1-methylpseudouridine
  modified_base (3982)..(3982): 1-methylpseudouridine
  modified_base (3984)..(3984): 1-methylpseudouridine
  modified_base (3988)..(3988): 1-methylpseudouridine

SEQ ID NO: 106 - RNA, 3819 nt, Artificial Sequence; identical to SEQ ID NO: 28
  Synthetic
  modified_base (2)..(2): 1-methylpseudouridine
  modified_base (4)..(5): 1-methylpseudouridine
  modified_base (8)..(8): 1-methylpseudouridine
  modified_base (10)..(11): 1-methylpseudouridine
  modified_base (14)..(14): 1-methylpseudouridine
  modified_base (17)..(17): 1-methylpseudouridine
  modified_base (20)..(20): 1-methylpseudouridine
  modified_base (23)..(23): 1-methylpseudouridine
  modified_base (29)..(29): 1-methylpseudouridine
  modified_base (32)..(32): 1-methylpseudouridine
  modified_base (43)..(43): 1-methylpseudouridine
  modified_base (47)..(47): 1-methylpseudouridine
  modified_base (53)..(53): 1-methylpseudouridine
  modified_base (71)..(71): 1-methylpseudouridine
  modified_base (82)..(82): 1-methylpseudouridine
  modified_base (94)..(95): 1-methylpseudouridine
  modified_base (107)..(107): 1-methylpseudouridine
  modified_base (109)..(109): 1-methylpseudouridine
  modified_base (112)..(112): 1-methylpseudouridine
  modified_base (125)..(125): 1-methylpseudouridine
  modified_base (127)..(128): 1-methylpseudouridine
  modified_base (140)..(140): 1-methylpseudouridine
  modified_base (143)..(143): 1-methylpseudouridine
  modified_base (161)..(161): 1-methylpseudouridine
  modified_base (163)..(164): 1-methylpseudouridine
  modified_base (167)..(167): 1-methylpseudouridine
  modified_base (172)..(173): 1-methylpseudouridine
  modified_base (175)..(176): 1-methylpseudouridine
  modified_base (185)..(185): 1-methylpseudouridine
  modified_base (190)..(190): 1-methylpseudouridine
  modified_base (193)..(194): 1-methylpseudouridine
  modified_base (203)..(203): 1-methylpseudouridine
  modified_base (209)..(209): 1-methylpseudouridine
  modified_base (235)..(236): 1-methylpseudouridine
  modified_base (248)..(248): 1-methylpseudouridine
  modified_base (251)..(251): 1-methylpseudouridine
  modified_base (256)..(257): 1-methylpseudouridine
  modified_base (269)..(269): 1-methylpseudouridine
  modified_base (271)..(271): 1-methylpseudouridine
  modified_base (274)..(275): 1-methylpseudouridine
  modified_base (299)..(299): 1-methylpseudouridine
  modified_base (302)..(302): 1-methylpseudouridine
  modified_base (310)..(310): 1-methylpseudouridine
  modified_base (314)..(314): 1-methylpseudouridine
  modified_base (316)..(317): 1-methylpseudouridine
  modified_base (329)..(329): 1-methylpseudouridine
  modified_base (350)..(350): 1-methylpseudouridine
  modified_base (353)..(353): 1-methylpseudouridine
  modified_base (356)..(356): 1-methylpseudouridine
  modified_base (359)..(359): 1-methylpseudouridine
  modified_base (363)..(363): 1-methylpseudouridine
  modified_base (377)..(377): 1-methylpseudouridine
  modified_base (380)..(380): 1-methylpseudouridine
  modified_base (383)..(383): 1-methylpseudouridine
  modified_base (389)..(389): 1-methylpseudouridine
  modified_base (391)..(391): 1-methylpseudouridine
  modified_base (397)..(398): 1-methylpseudouridine
  modified_base (403)..(404): 1-methylpseudouridine
  modified_base (406)..(406): 1-methylpseudouridine
  modified_base (418)..(419): 1-methylpseudouridine
  modified_base (422)..(422): 1-methylpseudouridine
  modified_base (428)..(428): 1-methylpseudouridine
  modified_base (430)..(430): 1-methylpseudouridine
  modified_base (433)..(433): 1-methylpseudouridine
  modified_base (454)..(454): 1-methylpseudouridine
  modified_base (458)..(458): 1-methylpseudouridine
  modified_base (469)..(470): 1-methylpseudouridine
  modified_base (476)..(476): 1-methylpseudouridine
  modified_base (478)..(478): 1-methylpseudouridine
  modified_base (496)..(496): 1-methylpseudouridine
  modified_base (502)..(503): 1-methylpseudouridine
  modified_base (508)..(508): 1-methylpseudouridine
  modified_base (512)..(512): 1-methylpseudouridine
  modified_base (523)..(524): 1-methylpseudouridine
  modified_base (527)..(527): 1-methylpseudouridine
  modified_base (530)..(530): 1-methylpseudouridine
  modified_base (536)..(536): 1-methylpseudouridine
  modified_base (556)..(557): 1-methylpseudouridine
  modified_base (566)..(566): 1-methylpseudouridine
  modified_base (574)..(575): 1-methylpseudouridine
  modified_base (578)..(578): 1-methylpseudouridine
  modified_base (580)..(581): 1-methylpseudouridine
  modified_base (590)..(590): 1-methylpseudouridine
  modified_base (598)..(598): 1-methylpseudouridine
  modified_base (601)..(602): 1-methylpseudouridine
  modified_base (608)..(608): 1-methylpseudouridine
  modified_base (610)..(610): 1-methylpseudouridine
  modified_base (629)..(629): 1-methylpseudouridine
  modified_base (635)..(635): 1-methylpseudouridine
  modified_base (638)..(638): 1-methylpseudouridine
  modified_base (645)..(645): 1-methylpseudouridine
  modified_base (647)..(647): 1-methylpseudouridine
  modified_base (658)..(659): 1-methylpseudouridine
  modified_base (661)..(661): 1-methylpseudouridine
  modified_base (668)..(668): 1-methylpseudouridine
  modified_base (677)..(677): 1-methylpseudouridine
  modified_base (680)..(680): 1-methylpseudouridine
  modified_base (686)..(686): 1-methylpseudouridine
  modified_base (692)..(692): 1-methylpseudouridine
  modified_base (698)..(698): 1-methylpseudouridine
  modified_base (704)..(704): 1-methylpseudouridine
  modified_base (712)..(713): 1-methylpseudouridine
  modified_base (722)..(722): 1-methylpseudouridine
  modified_base (725)..(725): 1-methylpseudouridine
  modified_base (731)..(731): 1-methylpseudouridine
  modified_base (742)..(742): 1-methylpseudouridine
  modified_base (746)..(746): 1-methylpseudouridine
  modified_base (772)..(772): 1-methylpseudouridine
  modified_base (789)..(789): 1-methylpseudouridine
  modified_base (792)..(793): 1-methylpseudouridine
  modified_base (796)..(796): 1-methylpseudouridine
  modified_base (800)..(800): 1-methylpseudouridine
  modified_base (805)..(805): 1-methylpseudouridine
  modified_base (809)..(809): 1-methylpseudouridine
  modified_base (823)..(824): 1-methylpseudouridine
  modified_base (827)..(827): 1-methylpseudouridine
  modified_base (830)..(830): 1-methylpseudouridine
  modified_base (835)..(835): 1-methylpseudouridine
  modified_base (854)..(854): 1-methylpseudouridine
  modified_base (866)..(866): 1-methylpseudouridine
  modified_base (871)..(871): 1-methylpseudouridine
  modified_base (878)..(878): 1-methylpseudouridine
  modified_base (885)..(885): 1-methylpseudouridine
  modified_base (887)..(887): 1-methylpseudouridine
  modified_base (901)..(901): 1-methylpseudouridine
  modified_base (908)..(908): 1-methylpseudouridine
  modified_base (916)..(917): 1-methylpseudouridine
  modified_base (923)..(923): 1-methylpseudouridine
  modified_base (935)..(935): 1-methylpseudouridine
  modified_base (937)..(937): 1-methylpseudouridine
  modified_base (952)..(953): 1-methylpseudouridine
  modified_base (959)..(959): 1-methylpseudouridine
  modified_base (977)..(977): 1-methylpseudouridine
  modified_base (980)..(980): 1-methylpseudouridine
  modified_base (985)..(986): 1-methylpseudouridine
  modified_base (995)..(995): 1-methylpseudouridine
  modified_base (1004)..(1004): 1-methylpseudouridine
  modified_base (1006)..(1006): 1-methylpseudouridine
  modified_base (1012)..(1013): 1-methylpseudouridine
  modified_base (1022)..(1022): 1-methylpseudouridine
  modified_base (1024)..(1025): 1-methylpseudouridine
  modified_base (1039)..(1040): 1-methylpseudouridine
  modified_base (1049)..(1049): 1-methylpseudouridine
  modified_base (1051)..(1051): 1-methylpseudouridine
  modified_base (1057)..(1057): 1-methylpseudouridine
  modified_base (1073)..(1073): 1-methylpseudouridine
  modified_base (1081)..(1081): 1-methylpseudouridine
  modified_base (1085)..(1085): 1-methylpseudouridine
  modified_base (1093)..(1093): 1-methylpseudouridine
  modified_base (1100)..(1100): 1-methylpseudouridine
  modified_base (1103)..(1103): 1-methylpseudouridine
  modified_base (1105)..(1105): 1-methylpseudouridine
  modified_base (1120)..(1121): 1-methylpseudouridine
  modified_base (1129)..(1130): 1-methylpseudouridine
  modified_base (1135)..(1135): 1-methylpseudouridine
  modified_base (1138)..(1138): 1-methylpseudouridine
  modified_base (1145)..(1145): 1-methylpseudouridine
  modified_base (1160)..(1160): 1-methylpseudouridine
  modified_base (1169)..(1169): 1-methylpseudouridine
  modified_base (1171)..(1171): 1-methylpseudouridine
  modified_base (1174)..(1175): 1-methylpseudouridine
  modified_base (1184)..(1184): 1-methylpseudouridine
  modified_base (1186)..(1186): 1-methylpseudouridine
  modified_base (1198)..(1199): 1-methylpseudouridine
  modified_base (1202)..(1202): 1-methylpseudouridine
  modified_base (1205)..(1205): 1-methylpseudouridine
  modified_base (1209)..(1209): 1-methylpseudouridine
  modified_base (1220)..(1220): 1-methylpseudouridine
  modified_base (1229)..(1229): 1-methylpseudouridine
  modified_base (1253)..(1253): 1-methylpseudouridine
  modified_base (1261)..(1261): 1-methylpseudouridine
  modified_base (1267)..(1267): 1-methylpseudouridine
  modified_base (1274)..(1274): 1-methylpseudouridine
  modified_base (1285)..(1286): 1-methylpseudouridine
  modified_base (1294)..(1294): 1-methylpseudouridine
  modified_base (1298)..(1298): 1-methylpseudouridine
  modified_base (1301)..(1301): 1-methylpseudouridine
  modified_base (1306)..(1306): 1-methylpseudouridine
  modified_base (1322)..(1322): 1-methylpseudouridine
  modified_base (1334)..(1334): 1-methylpseudouridine
  modified_base (1345)..(1345): 1-methylpseudouridine
  modified_base (1351)..(1351): 1-methylpseudouridine
  modified_base (1355)..(1355): 1-methylpseudouridine
  modified_base (1357)..(1357): 1-methylpseudouridine
  modified_base (1364)..(1364): 1-methylpseudouridine
  modified_base (1366)..(1367): 1-methylpseudouridine
  modified_base (1382)..(1382): 1-methylpseudouridine
  modified_base (1390)..(1391): 1-methylpseudouridine
  modified_base (1403)..(1403): 1-methylpseudouridine
  modified_base (1415)..(1415): 1-methylpseudouridine
  modified_base (1417)..(1417): 1-methylpseudouridine
  modified_base (1429)..(1429): 1-methylpseudouridine
  modified_base (1437)..(1438): 1-methylpseudouridine
  modified_base (1448)..(1448): 1-methylpseudouridine
  modified_base (1456)..(1457): 1-methylpseudouridine
  modified_base (1462)..(1462): 1-methylpseudouridine
  modified_base (1465)..(1465): 1-methylpseudouridine
  modified_base (1468)..(1469): 1-methylpseudouridine
  modified_base (1473)..(1473): 1-methylpseudouridine
  modified_base (1475)..(1475): 1-methylpseudouridine
  modified_base (1483)..(1483): 1-methylpseudouridine
  modified_base (1489)..(1490): 1-methylpseudouridine
  modified_base (1508)..(1508): 1-methylpseudouridine
  modified_base (1513)..(1513): 1-methylpseudouridine
  modified_base (1522)..(1522): 1-methylpseudouridine
  modified_base (1529)..(1529): 1-methylpseudouridine
  modified_base (1532)..(1532): 1-methylpseudouridine
  modified_base (1535)..(1535): 1-methylpseudouridine
  modified_base (1538)..(1538): 1-methylpseudouridine
  modified_base (1543)..(1544): 1-methylpseudouridine
  modified_base (1550)..(1550): 1-methylpseudouridine
  modified_base (1553)..(1553): 1-methylpseudouridine
  modified_base (1571)..(1571): 1-methylpseudouridine
  modified_base (1573)..(1573): 1-methylpseudouridine
  modified_base (1575)..(1575): 1-methylpseudouridine
  modified_base (1598)..(1598): 1-methylpseudouridine
  modified_base (1601)..(1601): 1-methylpseudouridine
  modified_base (1612)..(1612): 1-methylpseudouridine
  modified_base (1616)..(1616): 1-methylpseudouridine
  modified_base (1621)..(1622): 1-methylpseudouridine
  modified_base (1627)..(1628): 1-methylpseudouridine
  modified_base (1637)..(1638): 1-methylpseudouridine
  modified_base (1652)..(1652): 1-methylpseudouridine
  modified_base (1655)..(1655): 1-methylpseudouridine
  modified_base (1675)..(1676): 1-methylpseudouridine
  modified_base (1679)..(1679): 1-methylpseudouridine
  modified_base (1684)..(1686): 1-methylpseudouridine
  modified_base (1693)..(1694): 1-methylpseudouridine
  modified_base (1706)..(1706): 1-methylpseudouridine
  modified_base (1725)..(1725): 1-methylpseudouridine
  modified_base (1727)..(1727): 1-methylpseudouridine
  modified_base (1734)..(1734): 1-methylpseudouridine
  modified_base (1745)..(1745): 1-methylpseudouridine
  modified_base (1751)..(1751): 1-methylpseudouridine
  modified_base (1754)..(1754): 1-methylpseudouridine
  modified_base (1760)..(1760): 1-methylpseudouridine
  modified_base (1767)..(1768): 1-methylpseudouridine
  modified_base (1774)..(1775): 1-methylpseudouridine
  modified_base (1784)..(1784): 1-methylpseudouridine
  modified_base (1790)..(1790): 1-methylpseudouridine
  modified_base (1793)..(1793): 1-methylpseudouridine
  modified_base (1823)..(1823): 1-methylpseudouridine
  modified_base (1829)..(1829): 1-methylpseudouridine
  modified_base (1832)..(1832): 1-methylpseudouridine
  modified_base (1834)..(1834): 1-methylpseudouridine
  modified_base (1844)..(1844): 1-methylpseudouridine
  modified_base (1849)..(1849): 1-methylpseudouridine
  modified_base (1859)..(1859): 1-methylpseudouridine
  modified_base (1865)..(1865): 1-methylpseudouridine
  modified_base (1871)..(1871): 1-methylpseudouridine
  modified_base (1886)..(1886): 1-methylpseudouridine
  modified_base (1897)..(1897): 1-methylpseudouridine
  modified_base (1904)..(1904): 1-methylpseudouridine
  modified_base (1906)..(1906): 1-methylpseudouridine
  modified_base (1925)..(1925): 1-methylpseudouridine
  modified_base (1927)..(1928): 1-methylpseudouridine
  modified_base (1944)..(1945): 1-methylpseudouridine
  modified_base (1949)..(1949): 1-methylpseudouridine
  modified_base (1952)..(1952): 1-methylpseudouridine
  modified_base (1967)..(1967): 1-methylpseudouridine
  modified_base (1978)..(1978): 1-methylpseudouridine
  modified_base (1984)..(1984): 1-methylpseudouridine
  modified_base (1991)..(1991): 1-methylpseudouridine
  modified_base (1997)..(1997): 1-methylpseudouridine
  modified_base (2009)..(2009): 1-methylpseudouridine
  modified_base (2011)..(2011): 1-methylpseudouridine
  modified_base (2013)..(2013): 1-methylpseudouridine
  modified_base (2020)..(2020): 1-methylpseudouridine
  modified_base (2037)..(2038): 1-methylpseudouridine
  modified_base (2060)..(2060): 1-methylpseudouridine
  modified_base (2075)..(2075): 1-methylpseudouridine
  modified_base (2078)..(2078): 1-methylpseudouridine
  modified_base (2083)..(2083): 1-methylpseudouridine
  modified_base (2090)..(2090): 1-methylpseudouridine
  modified_base (2096)..(2096): 1-methylpseudouridine
  modified_base (2114)..(2114): 1-methylpseudouridine
  modified_base (2119)..(2119): 1-methylpseudouridine
  modified_base (2135)..(2135): 1-methylpseudouridine
  modified_base (2141)..(2141): 1-methylpseudouridine
  modified_base (2152)..(2153): 1-methylpseudouridine
  modified_base (2159)..(2159): 1-methylpseudouridine
  modified_base (2165)..(2165): 1-methylpseudouridine
  modified_base (2177)..(2178): 1-methylpseudouridine
  modified_base (2180)..(2180): 1-methylpseudouridine
  modified_base (2186)..(2186): 1-methylpseudouridine
  modified_base (2192)..(2192): 1-methylpseudouridine
  modified_base (2207)..(2207): 1-methylpseudouridine
  modified_base (2212)..(2212): 1-methylpseudouridine
  modified_base (2219)..(2219): 1-methylpseudouridine
  modified_base (2221)..(2221): 1-methylpseudouridine
  modified_base (2225)..(2225): 1-methylpseudouridine
  modified_base (2227)..(2227): 1-methylpseudouridine
  modified_base (2245)..(2245): 1-methylpseudouridine
  modified_base (2255)..(2255): 1-methylpseudouridine
  modified_base (2258)..(2258): 1-methylpseudouridine
  modified_base (2261)..(2261): 1-methylpseudouridine
  modified_base (2266)..(2266): 1-methylpseudouridine
  modified_base (2275)..(2276): 1-methylpseudouridine
  modified_base (2278)..(2278): 1-methylpseudouridine
  modified_base (2288)..(2288): 1-methylpseudouridine
  modified_base (2300)..(2300): 1-methylpseudouridine
  modified_base (2309)..(2309): 1-methylpseudouridine
  modified_base (2315)..(2315): 1-methylpseudouridine
  modified_base (2342)..(2342): 1-methylpseudouridine
  modified_base (2344)..(2345): 1-methylpseudouridine
  modified_base (2354)..(2354): 1-methylpseudouridine
  modified_base (2363)..(2363): 1-methylpseudouridine
  modified_base (2365)..(2365): 1-methylpseudouridine
  modified_base (2376)..(2376): 1-methylpseudouridine
  modified_base (2381)..(2381): 1-methylpseudouridine
  modified_base (2389)..(2390): 1-methylpseudouridine
  modified_base (2398)..(2399): 1-methylpseudouridine
  modified_base (2404)..(2405): 1-methylpseudouridine
  modified_base (2414)..(2414): 1-methylpseudouridine
  modified_base (2417)..(2417): 1-methylpseudouridine
  modified_base (2449)..(2450): 1-methylpseudouridine
  modified_base (2453)..(2453): 1-methylpseudouridine
  modified_base (2462)..(2462): 1-methylpseudouridine
  modified_base (2465)..(2465): 1-methylpseudouridine
  modified_base (2467)..(2468): 1-methylpseudouridine
  modified_base (2477)..(2477): 1-methylpseudouridine
  modified_base (2483)..(2483): 1-methylpseudouridine
  modified_base (2497)..(2498): 1-methylpseudouridine
  modified_base (2501)..(2501): 1-methylpseudouridine
  modified_base (2509)..(2509): 1-methylpseudouridine
  modified_base (2518)..(2518): 1-methylpseudouridine
  modified_base (2522)..(2522): 1-methylpseudouridine
  modified_base (2531)..(2531): 1-methylpseudouridine
  modified_base (2546)..(2546): 1-methylpseudouridine
  modified_base (2549)..(2549): 1-methylpseudouridine
  modified_base (2551)..(2551): 1-methylpseudouridine
  modified_base (2563)..(2564): 1-methylpseudouridine
  modified_base (2573)..(2573): 1-methylpseudouridine
  modified_base (2579)..(2579): 1-methylpseudouridine
  modified_base (2582)..(2582): 1-methylpseudouridine
  modified_base (2586)..(2586): 1-methylpseudouridine
  modified_base (2591)..(2591): 1-methylpseudouridine
  modified_base (2594)..(2594): 1-methylpseudouridine
  modified_base (2606)..(2606): 1-methylpseudouridine
  modified_base (2609)..(2609): 1-methylpseudouridine
  modified_base (2617)..(2617): 1-methylpseudouridine
  modified_base (2630)..(2630): 1-methylpseudouridine
  modified_base (2632)..(2633): 1-methylpseudouridine
  modified_base (2645)..(2645): 1-methylpseudouridine
  modified_base (2656)..(2656): 1-methylpseudouridine
  modified_base (2661)..(2663): 1-methylpseudouridine
  modified_base (2670)..(2670): 1-methylpseudouridine
  modified_base (2679)..(2679): 1-methylpseudouridine
  modified_base (2681)..(2681): 1-methylpseudouridine
  modified_base (2687)..(2687): 1-methylpseudouridine
  modified_base (2692)..(2693): 1-methylpseudouridine
  modified_base (2699)..(2699): 1-methylpseudouridine
  modified_base (2705)..(2705): 1-methylpseudouridine
  modified_base (2710)..(2710): 1-methylpseudouridine
  modified_base (2716)..(2717): 1-methylpseudouridine
  modified_base (2726)..(2726): 1-methylpseudouridine
  modified_base (2732)..(2732): 1-methylpseudouridine
  modified_base (2744)..(2744): 1-methylpseudouridine
  modified_base (2747)..(2747): 1-methylpseudouridine
  modified_base (2749)..(2749): 1-methylpseudouridine
  modified_base (2765)..(2765): 1-methylpseudouridine
  modified_base (2768)..(2768): 1-methylpseudouridine
  modified_base (2779)..(2780): 1-methylpseudouridine
  modified_base (2792)..(2792): 1-methylpseudouridine
  modified_base (2801)..(2801): 1-methylpseudouridine
  modified_base (2813)..(2813): 1-methylpseudouridine
  modified_base (2826)..(2826): 1-methylpseudouridine
  modified_base (2834)..(2834): 1-methylpseudouridine
  modified_base (2843)..(2843): 1-methylpseudouridine
  modified_base (2852)..(2852): 1-methylpseudouridine
  modified_base (2855)..(2855): 1-methylpseudouridine
  modified_base (2876)..(2876): 1-methylpseudouridine
  modified_base (2885)..(2885): 1-methylpseudouridine
  modified_base (2888)..(2888): 1-methylpseudouridine
  modified_base (2897)..(2897): 1-methylpseudouridine
  modified_base (2908)..(2909): 1-methylpseudouridine
  modified_base (2918)..(2918): 1-methylpseudouridine
  modified_base (2927)..(2927): 1-methylpseudouridine
  modified_base (2930)..(2930): 1-methylpseudouridine
  modified_base (2939)..(2939): 1-methylpseudouridine
  modified_base (2942)..(2942): 1-methylpseudouridine
  modified_base (2951)..(2951): 1-methylpseudouridine
  modified_base (2958)..(2958): 1-methylpseudouridine
  modified_base (2972)..(2972): 1-methylpseudouridine
  modified_base (2978)..(2978): 1-methylpseudouridine
  modified_base (2987)..(2987): 1-methylpseudouridine
  modified_base (2990)..(2990): 1-methylpseudouridine
  modified_base (2994)..(2994): 1-methylpseudouridine
  modified_base (3002)..(3002): 1-methylpseudouridine
  modified_base (3011)..(3011): 1-methylpseudouridine
  modified_base (3019)..(3019): 1-methylpseudouridine
  modified_base (3023)..(3023): 1-methylpseudouridine
  modified_base (3035)..(3035): 1-methylpseudouridine
  modified_base (3038)..(3038): 1-methylpseudouridine
  modified_base (3053)..(3054): 1-methylpseudouridine
  modified_base (3071)..(3071): 1-methylpseudouridine
  modified_base (3086)..(3086): 1-methylpseudouridine
  modified_base (3094)..(3094): 1-methylpseudouridine
  modified_base (3098)..(3098): 1-methylpseudouridine
  modified_base (3101)..(3101): 1-methylpseudouridine
  modified_base (3119)..(3119): 1-methylpseudouridine
  modified_base (3124)..(3125): 1-methylpseudouridine
  modified_base (3127)..(3127): 1-methylpseudouridine
  modified_base (3139)..(3139): 1-methylpseudouridine
  modified_base (3146)..(3146): 1-methylpseudouridine
  modified_base (3149)..(3149): 1-methylpseudouridine
  modified_base (3154)..(3156): 1-methylpseudouridine
  modified_base (3179)..(3179): 1-methylpseudouridine
  modified_base (3182)..(3182): 1-methylpseudouridine
  modified_base (3184)..(3185): 1-methylpseudouridine
  modified_base (3188)..(3188): 1-methylpseudouridine
  modified_base (3194)..(3194): 1-methylpseudouridine
  modified_base (3199)..(3199): 1-methylpseudouridine
  modified_base (3203)..(3203): 1-methylpseudouridine
  modified_base (3223)..(3224): 1-methylpseudouridine
  modified_base (3242)..(3242): 1-methylpseudouridine
  modified_base (3244)..(3244): 1-methylpseudouridine
  modified_base (3265)..(3267): 1-methylpseudouridine
  modified_base (3281)..(3281): 1-methylpseudouridine
  modified_base (3283)..(3284): 1-methylpseudouridine
  modified_base (3287)..(3287): 1-methylpseudouridine
  modified_base (3304)..(3304): 1-methylpseudouridine
  modified_base (3307)..(3308): 1-methylpseudouridine
  modified_base (3311)..(3311): 1-methylpseudouridine
  modified_base (3325)..(3326): 1-methylpseudouridine
  modified_base (3328)..(3328): 1-methylpseudouridine
  modified_base (3341)..(3341): 1-methylpseudouridine
  modified_base (3344)..(3344): 1-methylpseudouridine
  modified_base (3361)..(3362): 1-methylpseudouridine
  modified_base (3365)..(3365): 1-methylpseudouridine
  modified_base (3376)..(3376): 1-methylpseudouridine
  modified_base (3383)..(3383): 1-methylpseudouridine
  modified_base (3386)..(3386): 1-methylpseudouridine
  modified_base (3389)..(3389): 1-methylpseudouridine
  modified_base (3395)..(3395): 1-methylpseudouridine
  modified_base (3398)..(3398): 1-methylpseudouridine
  modified_base (3410)..(3410): 1-methylpseudouridine
  modified_base (3412)..(3412): 1-methylpseudouridine
  modified_base (3417)..(3417): 1-methylpseudouridine
  modified_base (3422)..(3422): 1-methylpseudouridine
  modified_base (3434)..(3434): 1-methylpseudouridine
  modified_base (3442)..(3443): 1-methylpseudouridine
  modified_base (3455)..(3455): 1-methylpseudouridine
  modified_base (3463)..(3463): 1-methylpseudouridine
  modified_base (3466)..(3467): 1-methylpseudouridine
  modified_base (3474)..(3474): 1-methylpseudouridine
  modified_base (3491)..(3491): 1-methylpseudouridine
  modified_base (3497)..(3497): 1-methylpseudouridine
  modified_base (3506)..(3506): 1-methylpseudouridine
  modified_base (3515)..(3515): 1-methylpseudouridine
  modified_base (3527)..(3527): 1-methylpseudouridine
  modified_base (3530)..(3530): 1-methylpseudouridine
  modified_base (3536)..(3536): 1-methylpseudouridine
  modified_base (3548)..(3548): 1-methylpseudouridine
  modified_base (3552)..(3552): 1-methylpseudouridine
  modified_base (3557)..(3557): 1-methylpseudouridine
  modified_base (3566)..(3566): 1-methylpseudouridine
  modified_base (3578)..(3578): 1-methylpseudouridine
  modified_base (3590)..(3590): 1-methylpseudouridine
  modified_base (3593)..(3593): 1-methylpseudouridine
  modified_base (3599)..(3599): 1-methylpseudouridine
  modified_base (3608)..(3608): 1-methylpseudouridine
  modified_base (3616)..(3616): 1-methylpseudouridine
  modified_base (3625)..(3625): 1-methylpseudouridine
  modified_base (3629)..(3629): 1-methylpseudouridine
  modified_base (3634)..(3634): 1-methylpseudouridine
  modified_base (3640)..(3640): 1-methylpseudouridine
  modified_base (3643)..(3643): 1-methylpseudouridine
  modified_base (3647)..(3647): 1-methylpseudouridine
  modified_base (3649)..(3649): 1-methylpseudouridine
  modified_base (3653)..(3653): 1-methylpseudouridine
  modified_base (3658)..(3659): 1-methylpseudouridine
  modified_base (3662)..(3662): 1-methylpseudouridine
  modified_base (3671)..(3671): 1-methylpseudouridine
  modified_base (3674)..(3674): 1-methylpseudouridine
  modified_base (3680)..(3680): 1-methylpseudouridine
  modified_base (3683)..(3683): 1-methylpseudouridine
  modified_base (3686)..(3686): 1-methylpseudouridine
  modified_base (3689)..(3689): 1-methylpseudouridine
  modified_base (3695)..(3695): 1-methylpseudouridine
  modified_base (3698)..(3698): 1-methylpseudouridine
  modified_base (3701)..(3701): 1-methylpseudouridine
  modified_base (3703)..(3703): 1-methylpseudouridine
  modified_base (3706)..(3706): 1-methylpseudouridine
  modified_base (3710)..(3710): 1-methylpseudouridine
  modified_base (3718)..(3718): 1-methylpseudouridine
  modified_base (3721)..(3721): 1-methylpseudouridine
  modified_base (3727)..(3727): 1-methylpseudouridine
  modified_base (3731)..(3731): 1-methylpseudouridine
  modified_base (3739)..(3739): 1-methylpseudouridine
  modified_base (3741)..(3742): 1-methylpseudouridine
  modified_base (3748)..(3748): 1-methylpseudouridine
  modified_base (3757)..(3757): 1-methylpseudouridine
  modified_base (3760)..(3760): 1-methylpseudouridine
  modified_base (3766)..(3767): 1-methylpseudouridine
  modified_base (3791)..(3791): 1-methylpseudouridine
  modified_base (3794)..(3794): 1-methylpseudouridine
  modified_base (3803)..(3803): 1-methylpseudouridine
  modified_base (3809)..(3809): 1-methylpseudouridine
  modified_base (3814)..(3814): 1-methylpseudouridine

What is claimed is:

1. A messenger ribonucleic acid (mRNA) comprising an open reading frame (ORF) that encodes a SARS-CoV-2 spike (S) protein having a double proline stabilizing mutation.

2. The mRNA of claim 1, wherein the double proline stabilizing mutation is at positions corresponding to K986 and V987 of a wild-type SARS-CoV-2 S protein.

3. The mRNA of claim 1, wherein the coronavirus antigen comprises an amino acid sequence having at least 80%, at least 85%, at least 90%, at least 95%, or at least 98% identity to the amino acid sequence of SEQ ID NO: 29.

4. The mRNA of claim 1, wherein the SARS-CoV-2 S protein comprises an amino acid sequence of SEQ ID NO: 29.

5. The mRNA of claim 1, wherein the mRNA comprises a 5′ untranslated region (UTR) and a 3′ UTR.

6. The mRNA of claim 5, wherein the 5′ UTR comprises the nucleotide sequence of SEQ ID NO: 2 or SEQ ID NO: 36 and/or the 3′ UTR comprises the nucleotide sequence of SEQ ID NO: 4 or SEQ ID NO: 37.

7. A composition comprising a lipid nanoparticle and a messenger RNA (mRNA) comprising an open reading frame (ORF) that encodes a SARS-CoV-2 spike (S) protein having a double proline stabilizing mutation of a wild-type SARS-CoV-2 S protein.

8. The composition of claim 7, wherein the lipid nanoparticle comprises a PEG-modified lipid, a non-cationic lipid, a sterol, an ionizable cationic lipid, or any combination thereof.

9. The composition of claim 8, wherein the lipid nanoparticle comprises 0.5-15 mol % PEG-modified lipid; 5-25 mol % non-cationic lipid; 25-55 mol % sterol; and 20-60 mol % ionizable cationic lipid.

10. A messenger ribonucleic acid (mRNA) comprising an open reading frame (ORF) that comprises a nucleotide sequence having at least 80% identity to the nucleotide sequence of SEQ ID NO: 28 and encodes a polypeptide comprising the amino acid sequence of SEQ ID NO: 29.

11. The mRNA of claim 10, wherein the ORF comprises a nucleotide sequence having at least 85%, at least 90%, at least 95%, or at least 98% identity to the nucleotide sequence of SEQ ID NO: 28.

12. The mRNA of claim 10, wherein the ORF comprises a nucleotide sequence of SEQ ID NO: 28.

13. The mRNA of claim 10, wherein the mRNA comprises a nucleotide sequence having at least 80%, at least 85%, at least 90%, at least 95%, or at least 98% identity to the nucleotide sequence of SEQ ID NO: 27.

14. The mRNA of claim 10, wherein the mRNA comprises a nucleotide sequence of SEQ ID NO: 27.

15. The mRNA of claim 10, wherein the RNA comprises a 5′ untranslated region (UTR) and a 3′ UTR.

16. The mRNA of claim 15, wherein the 5′ UTR comprises the nucleotide sequence of SEQ ID NO: 2 or SEQ ID NO: 36.

17. The mRNA of claim 15, wherein the 3′ UTR comprises the nucleotide sequence of SEQ ID NO: 4 or SEQ ID NO: 37.

18. The mRNA of any one of claims 10-17, wherein the mRNA comprises a chemical modification.

19. The mRNA of claim 18, wherein the mRNA is chemically modified with 1-methyl-pseudouridine, such that each U in the sequence is a 1-methyl-pseudouridine.

20. A composition comprising a lipid nanoparticle and a messenger RNA (mRNA) comprising an open reading frame (ORF) that comprises a nucleotide sequence having at least 80% identity to the nucleotide sequence of SEQ ID NO: 28 and encodes a polypeptide comprising the amino acid sequence of SEQ ID NO: 29.

21. The composition of claim 20, wherein the lipid nanoparticle comprises a PEG-modified lipid, a non-cationic lipid, a sterol, an ionizable cationic lipid, or any combination thereof.

22. The composition of claim 21, wherein the lipid nanoparticle comprises 0.5-15 mol % PEG-modified lipid; 5-25 mol % non-cationic lipid; 25-55 mol % sterol; and 20-60 mol % ionizable cationic lipid.

23. The composition of claim 22, wherein the PEG-modified lipid is 1,2 dimyristoyl-sn-glycerol, methoxypolyethyleneglycol (PEG2000 DMG), the non-cationic lipid is 1,2 distearoyl-sn-glycero-3-phosphocholine (DSPC), the sterol is cholesterol; and the ionizable cationic lipid has the structure of Compound 1:

[chemical structure]

24. A messenger ribonucleic acid (mRNA) comprising an open reading frame (ORF) that comprises a nucleotide sequence having at least 80% identity to the nucleotide sequence of any one of SEQ ID NOs 3, 7, 10, 13, 16, 19, 22, 25, 31, 48, 50, 52, 54, 56, 61, 62, 64, 66, 68, 70, 72, 74, 76, 78, 80, 82, 84, or 106.

25. The mRNA of claim 24, wherein the ORF comprises a nucleotide sequence having at least 85%, at least 90%, at least 95%, at least 98%, or at least 100% identity to the nucleotide sequence of any one of SEQ ID NOs: 3, 7, 10, 13, 16, 19, 22, 25, 31, 48, 50, 52, 54, 56, 61, 62, 64, 66, 68, 70, 72, 74, 76, 78, 80, 82, 84, or 106.

26. The mRNA of claim 24, wherein the ORF encodes a polypeptide comprising the amino acid sequence of any one of SEQ ID NOs: 5, 8, 11, 14, 17, 20, 23, 26, 32, 33, 34, 35, 47, 49, 59, 63, 65, 67, 69, 71, 73, 75, 77, 79, 81, 83, or 85.

27. The mRNA of claim 24, wherein the ORF encodes a polypeptide comprising an amino acid sequence having at least 80%, at least 85%, at least 90%, at least 95%, or at least 98% identity of any one of SEQ ID NOs: 5, 8, 11, 14, 17, 20, 23, 26, 32, 33, 34, 35, 47, 49, 59, 63, 65, 67, 69, 71, 73, 75, 77, 79, 81, 83, or 85.

28. The mRNA of claim 24, wherein the RNA comprises a 5′ untranslated region (UTR) and a 3′ UTR.

29. The mRNA of claim 28, wherein the 5′ UTR comprises the nucleotide sequence of SEQ ID NO: 2 or SEQ ID NO: 36.

30. The mRNA of claim 28, wherein the 3′ UTR comprises the nucleotide sequence of SEQ ID NO: 4 or SEQ ID NO: 37.

31. The mRNA of claim 24, wherein the mRNA comprises a chemical modification.

32. The mRNA of claim 31, wherein the mRNA is chemically with 1-methyl-pseudouridine, such that each U in the sequence is a 1-methyl-pseudouridine.

33. A composition comprising a lipid nanoparticle and a messenger RNA (mRNA), wherein the mRNA is an mRNA of any of claims 24-33.

34. The composition of claim 33, wherein the lipid nanoparticle comprises a PEG-modified lipid, a non-cationic lipid, a sterol, an ionizable cationic lipid, or any combination thereof.

35. The composition of claim 34, wherein the lipid nanoparticle comprises 0.5-15 mol % PEG-modified lipid; 5-25 mol % non-cationic lipid; 25-55 mol % sterol; and 20-60 mol % ionizable cationic lipid.

36. The composition of claim 35, wherein the PEG-modified lipid is 1,2 dimyristoyl-sn-glycerol, methoxypolyethyleneglycol (PEG2000 DMG), the non-cationic lipid is 1,2 distearoyl-sn-glycero-3-phosphocholine (DSPC), the sterol is cholesterol; and the ionizable cationic lipid has the structure of Compound 1:

[chemical structure]

37. A method comprising administering to a subject a messenger ribonucleic acid (mRNA) comprising an open reading frame (ORF) that encodes a SARS-CoV-2 spike (S) protein antigen having a double proline stabilizing mutation in an amount effective to induce a neutralizing antibody response against SARS-CoV-2 in the subject.

38. The method of claim 37, wherein the double proline stabilizing mutation is at positions corresponding to K986 and V987 of a wild-type SARS-CoV-2 S protein.

39. The method of any one of claims 37-38, wherein the mRNA is administered in an amount effective to induce a T cell immune response, optionally a CD4⁺ and/or a CD8⁺ T cell immune response against SARS-CoV-2 in the subject.

40. The method of any one of claims 37-39, wherein the subject is immunocompromised.

41. The method of any one of claims 37-39, wherein the subject has a pulmonary disease.

42. The method of any one of claims 37-39, wherein the subject is 65 years of age or older.

43. The method of any one of claims 37-39, comprising administering to the subject at least two doses of the composition.

44. The method of any one of claims 37-43, wherein detectable levels of the SARS-CoV-2 S protein are produced in serum of the subject at 1-72 hours post administration of the RNA or composition comprising the RNA.

45. The method of any one of claims 37-43, wherein a neutralizing antibody titer of at least 100 NU/ml, at least 500 NU/ml, or at least 1000 NU/ml is produced in the serum of the subject at 1-72 hours post administration of the RNA.

46. An immunizing composition comprising:
(a) a first ribonucleic acid (RNA) comprising an open reading frame (ORF) that encodes a coronavirus antigen capable of inducing an immune response, such as a neutralizing antibody response, to a SARS-CoV-2; and
(b) a second ribonucleic acid (RNA) comprising an open reading frame (ORF) that encodes a coronavirus antigen capable of inducing an immune response, such as a neutralizing antibody response, to a SARS-CoV-2, wherein the ORF of the first RNA is different from the ORF of the second RNA.
